(19) United States
(12) Patent Application Publication
(10) Pub. No.: US 2005/0208062 A1
(43) Pub. Date: Sep. 22, 2005

(54) Compositions and methods relating to hepatic specific genes and proteins

(76) Inventors: Yongming Sun, Redwood City, CA (US); Chenghua Liu, San Jose, CA (US)

Correspondence Address: LICATA & TYRRELL P.C., 66 E. MAIN STREET, MARLTON, NJ, 08053, US

(21) Appl. No.: 10/499,065

(22) PCT Filed: Dec. 20, 2002
(86) PCT No.: PCT/US02/41349

§ 371 Date: Dec. 27, 2004

Related U.S. Application Data
(60) Provisional application No. 60/343,137, filed on Dec. 21, 2001.

(51) Int. Cl. C12Q 1/68; G01N 33/574; C07H 21/04; C07K 14/705; A61K 39/00

(52) U.S. Cl. 424/185.1; 435/6; 435/69.1; 435/320.1; 435/325; 530/350; 536/23.5; 435/7.23; 514/44

(57) ABSTRACT

The present invention relates to newly identified nucleic acid molecules and polypeptides present in normal and neoplastic hepatic cells, including fragments, variants and derivatives of the nucleic acids and polypeptides. The present invention also relates to antibodies to the polypeptides of the invention, as well as agonists and antagonists of the polypeptides of the invention. The invention also relates to compositions containing the nucleic acid molecules, polypeptides, antibodies, agonists and antagonists of the invention and methods for the use of these compositions. These uses include identifying, diagnosing, monitoring, staging, imaging and treating hepatic cancer and non-cancerous disease states in hepatic, identifying hepatic tissue, monitoring and identifying and/or designing agonists and antagonists of polypeptides of the invention. The uses also include gene therapy, production of transgenic animals and cells, and production of engineered hepatic tissue for treatment and research.

[0001] This application claims the benefit of priority from U.S. Provisional Application No. 60/343,137, filed Dec. 21, 2001, which is herein incorporated by reference in its entirety.

### FIELD OF THE INVENTION

[0002] The present invention relates to newly identified nucleic acids and polypeptides present in normal and neoplastic liver and/or hepatic cells, including fragments, variants and derivatives of the nucleic acids and polypeptides. The present invention also relates to antibodies to the polypeptides of the invention, as well as agonists and antagonists of the polypeptides of the invention. The invention also relates to compositions comprising the nucleic acids, polypeptides, antibodies, post translational modifications (PTMs), variants, derivatives, agonists and antagonists of the invention and methods for the use of these compositions. These uses include identifying, diagnosing, monitoring, staging, imaging and treating hepatic cancer and non-cancerous disease states in hepatic, identifying hepatic tissue and monitoring and identifying and/or designing agonists and antagonists of polypeptides of the invention. The uses also include gene therapy, therapeutic molecules including but limited to antibodies or antisense molecules, production of transgenic animals and cells, and production of engineered hepatic tissue for treatment and research.

### BACKGROUND OF THE INVENTION

[0003] While relatively rare in the United States and Canada, hepatocellular carcinoma (HCC) is the eighth-most common cancer and the leading cause of cancer death in the world. Yu, M. C. et al., Can. J. Gastroenterol. 14(8): 703-09 (2000); Bookstein, R. et al., Semin. Oncol. 23(1): 66-77 (1996). Malignant primary hepatic tumors constitute two to three percent of primary cancers in the United States, with HCC accounting for 90% of malignant primary tumors of the liver in adults. Anderson, B. B. et al., J. Nat'l Med. Ass'n 84(2): 129-35 (1992). Outside of North America, regions of the world particularly at risk are the East, Southeast Asia, and sub-Saharan Africa. Yu et al., supra. In China, for example, HCC is the second-most cause of cancer mortality, accounting for 130,000 deaths annually. Tang, Z. Y. et al., Ann. Chir. 52(6): 558-63 (1998). HCC is now becoming a serious problem in the United States, principally due to patients with cirrhosis secondary to the hepatitis C virus developing liver cancer. Jeffers, L., J. Nat'l Med. Ass'n 92(8): 369-71 (2000).

[0004] Although our understanding of the etiology of HCC is undergoing continual refinement, research in this area points to a number of risk factors. In developed countries with populations at low risk for liver cancer, the hepatitis B virus (HBV) and hepatitis C virus (HCV) may be responsible for up to 75% of all liver cancer; in developing countries where HBV is prevalent, it may account for 60% of cases, with HCV playing a role in less than 10% of cases. F. Xavier Bosch, Global Epidemiology of Hepatocellular Carcinoma, in Liver Cancer 23 (Kunio Okuda & Edward Tabor, eds. 1997); see also Pei-Jer Chen & Ding-Shinn Chen, Hepatitis B Virus and Hepatocellular Carcinoma, in Liver Cancer 29 (Kunio Okuda & Edward Tabor, eds. 1997). Cirrhosis, which is considered by some to be a preneoplastic condition, is associated with three fourths of HCC cases. Swan N. Thung and Michael A. Gerber, Cirrhosis and Hepatocellular Carcinoma, in Liver Cancer 155 (Kunio Okuda & Edward Tabor, eds. 1997). Alcohol consumption and cigarette smoking are both risk factors for liver cancer, with a combined 1.2 to 2-fold risk, although cigarette smoking is thought to play a relatively minor role. Bosch, supra at 23-24. In developed countries, oral contraceptives have been linked to a two-fold to five-fold risk of liver cancer; in countries where HBV is relatively rare, the long-term usage of oral contraceptives may be responsible for as many as half of all liver cancer cases in women. Id. at 24. In Africa and certain areas of China and Southeast Asia, the incidence of liver cancer is correlated with predictions of the consumption of aflatoxin, a carcinogenic DNA intercalator generated by molds growing on spoiled food. Id. at 25; Gerald N. Wogan, Aflatoxin Exposure as a Risk Factor in the Etiology of Hepatocellular Carcinoma, in Liver Cancer 51 (Kunio Okuda & Edward Tabor, eds. 1997).

[0005] Despite recent progress in understanding the molecular and genetic causes of HCC, our understanding of these factors is nonetheless limited. Michael Geissler et al., Molecular Mechanisms of Hepatocarcinogenesis, in Liver Cancer 59 (Kunio Okuda & Edward Tabor, eds. 1997). Researchers have theorized that abnormal expression of proto-oncogenes, or the expression of mutant variations of these genes (oncogenes), may lead to the transformation of neoplasms. Id. Moreover, induction of apoptosis and alteration of the “p53 tumor suppressor gene-dependent cell cycle checkpoint function” are thought to be involved in HCC as well. Id. It has also been postulated that DNA hypomethylation may work as an epigenetic mechanism that participates in the transformation of hepatocytes. Id. Research is currently being performed to determine the possible role HBV and HCV in interfering with the proper function of tumor suppressor genes and in causing mutations in those genes. Edward Tabor, The Role of Tumor Suppressor Genes in the Development of Hepatocellular Carcinoma, in Liver Cancer 89 (Kunio Okuda & Edward Tabor, eds. 1997). Research is also exploring how liver inflammation and cirrhosis caused by HCV may act as “promoters” in the progression of HCC. Id.

[0006] The links between certain genetic and acquired diseases of liver metabolism and liver cancer, however, are well-established, particularly those diseases in which chronic liver injury and cirrhosis are hallmark features. Geissler et al., supra at 60-61; Yves Deugnier & Bruno Turlin, Other Causes of Hepatocellular Carcinoma, in Liver Cancer 97 (Kunio Okuda & Edward Tabor, eds. 1997). These diseases include (1) hematochromatosis, (2) α1-antitrypsin deficiency, which results from a variant gene on chromosome 14q3, (3) type I tyrosinemia, (4) porphyria cutanea tarda, and (5) alcoholic cirrhosis. Geissler, supra at 60; Deugnier & Turlin, supra at 102.

[0007] Like many cancers, HCC is more readily treatable when detected early. Michael C. Kew, Clinical and Nonimaging Diagnosis of Hepatocellular Carcinoma, in Liver Cancer 315 (Kunio Okuda & Edward Tabor, eds. 1997). Unfortunately, screening for liver cancer is made difficult because symptoms and physical signs of the disease do not occur until its very late stages. Id. The absence of clinical manifestations of early-stage liver cancer may be attributable to several factors: (1) the position of the liver deep in the peritoneal cavity, such that tumors cannot be readily felt, (2) the liver's vast functional reserves, which do not allow symptoms to appear until much of the organ has been replaced by carcinoma, and (3) HCC metastasizes in the late stages of the disease. Id.

[0008] Routine screening for HCC typically involves the use of ultrasound, in combination with the determination of serum levels of α-fetoprotein (AFP). Walter J. Burdette, Cancer: Etiology, Diagnosis, and Treatment 108 (1998); Yang, B. et al., J. Cancer Res. Clin. Oncol. 123(6): 357-60 (1997). Due to its ability to provide (1) excellent contrast resolution, (2) multiplanar images, and (3) characterization of cancerous lesions based on signal intensities in a variety of pulse sequences, magnetic resonance imaging (MRI) is becoming the modality of choice for screening patients for HCC. Sharma, R. & Saini, S., J. Comput. Assist. Tomogr. 23 Suppl. 1: S3944 (1999); Masaaki Ebara, MRI Diagnosis of Hepatocellular Carcinoma, in Liver Cancer 361 (Kunio Okuda & Edward Tabor, eds. 1997). Computed tomography (CT) has also proven effective at detecting HCC, particularly in cases where ultrasound is ineffective due to scar tissue, intervening bones, or air in the gut. Nyung Ihn Choi, CT Diagnosis of Liver Cancer, in Liver Cancer 371 (Kunio Okuda & Edward Tabor, eds. 1997). In fact, contrast-enhanced CT's ability to diagnose HCC does not differ significantly from MRI, although MRI is slightly superior in locating cancerous lesions that are 2 cm or smaller. Id. at 363. Hepatic angiography, while supplanted to some extent by ultrasound, CT, and MRI, remains useful in preoperative evaluation and in providing vascular maps. Kenichi Takayasu, Hepatic Angiography, in Liver Cancer 347 (Kunio Okuda & Edward Tabor, eds. 1997).

[0009] While a highly sensitive and specific marker would significantly facilitate HCC screening, no such marker has been discovered. Kew, supra at 325. Elevated serum level of AFP is a useful diagnostic indicator of HCC, but it is susceptible to false positives and false negatives. Id. at 325-26. Des-γ-carboxy prothrombin has been touted as a “better” HCC marker than AFP, but one study reports that AFP is both more sensitive and more specific than des-γ-carboxy prothrombin. Id. at 327. Tumor-associated isozymes of γ-glutamyl transferase, which are not detectable in normal serum, are highly specific but lack sensitivity. Id. While a number of other markers have been studied, none are sufficiently specific and sensitive to use in routine screening of HCC. Id. at 327-28.

[0010] Once HCC has been diagnosed, treatment decisions are made in reference to the stage of cancer progression. A number of the techniques employed to stage HCC are identical to those used to screen for HCC, including ultrasound, MRI, and CT. Hann, L. E. et al., Semin. Surg. Oncol. 19(2): 94-115 (2000). With the use of tissue-specific contrast reagents, MRI has begun to undermine the role of CT portography in preoperative staging, and may soon completely supplant it. Sharma & Saini, supra. Researchers have also found that laparoscopy, in combination with laparoscopic ultrasonography, is also effective in preoperative staging. Gouma, D. J. et al., Scand. J. Gastroenterol. Suppl. 218: 43-9 (1996). As in the case of screening, highly sensitive and specific markers would be of great assistance in staging HCC, yet none are presently available. Researchers have explored the use of soluble intercellular adhesion molecule-1, soluble interleukin-2 receptor, interleukin 6, and anti-p53, but none of these potential markers was found useful. Parasole, R. et al., Clin. Cancer Res. 7(11): 3504-09 (2001).

[0011] Several classification systems for staging hepatic cancer are currently used, including the TNM and the Okuda systems. Farinati, F. et al., Cancer 89(11): 2266-73 (2000). The TNM system, devised by the Union Internationale Contre le Cancer, is divided into several stages, each of which evaluates the extent of cancer growth with respect to primary tumor (T), regional lymph nodes (N), and distant metastasis (M). Fleming et al. eds., supra at 3. The TNM system will be discussed in further detail here.

[0012] Stage 1 is characterized by a single tumor of 2 cm or less in greatest dimension, without vascular invasion (T1), with no regional lymph node metastasis (N0) and no distant metastasis (M0). Id. at 94-95. Stages II and IIIA differ from stage I only with respect to tumor category. Id. Stage II involves tumor category T2, which may be either (1) a single tumor of 2 cm or less in greatest dimension, with vascular invasion, (2) multiple tumors in only one lobe, all 2 cm or less in greatest dimension, with no vascular invasion, or (3) a single tumor of more than 2 cm in greatest dimension, without vascular invasion. Id. Stage IIIA involves tumor category T3, which may be either (1) a single tumor of 2 cm or more in greatest dimension, with vascular invasion, (2) multiple tumors in only one lobe, all 2 cm or less in greatest dimension, with vascular invasion, or (3) multiple tumors in only one lobe, any of which are more than 2 cm in greatest dimension, with or without vascular invasion. Id.

[0013] Stage IIIB involves any one of the T1, T2, or T3 categories, metastasis to regional lymph nodes (N1), but no distant metastasis (M0). Stage IVA is characterized by tumor category T4, which may be either (1) multiple tumors in more than one lobe of the liver, (2) involvement of a major branch of the portal or hepatic veins, (3) invasion of nearby organs other than the gallbladder, or (4) perforation of the visceral peritoneum, and any N category with no distant metastasis (M0). Id. Lastly, stage IVB involves any T category, any N category, and distant metastasis (M1). Id.

[0014] Once the HCC has been staged, typical treatment includes resection, percutaneous ethanol injection, and transcatheter arterial embolization. Shuichi Okada, Chemotherapy for Hepatocellular Carcinoma, in Liver Cancer 441 (Kunio Okuda & Edward Tabor, eds. 1997). Indeed, surgical resection of the carcinoma(s) is the first line of treatment for HCC, assuming that no extra-hepatic metastasis has been identified, Kunio Okuda et al., Treatment Selection, in Liver Cancer 436 (Kunio Okuda & Edward Tabor, eds. 1997), and transplantation should always be considered in managing HCC, Burdette, supra at 111. Treatment with radiation, chemotherapeutics, hormones, and interferon have not proven consistently effective in curing HCC. Llovet, J. M. et al., Liver Transpl. 6(6 Suppl. 2): S11-5 (2000). As for radiation, the amount of radiation necessary to achieve an adequate response may be more than healthy hepatic cells can tolerate, Burdette, supra at 113, and as for chemotherapy, no individual anticancer agent or regimen of agents displays a response rate exceeding 20%, Okada, supra at 441.

[0015] New approaches involving immunotherapy are also being investigated, and these approaches fall within two general categories: specific immunotherapy and nonspecific immunotherapy. Daniel Shouval, Immunotherapy for Hepatocellular Carcinoma, in Liver Cancer 471 (Kunio Okuda & Edward Tabor, eds. 1997). As for specific strategies, researchers have targeted HCCs via monoclonal or polyclonal antibodies which recognize antigens on the cancer cell surface; these antibodies are either “free” or are joined to chemotherapeutic or biological molecules. Id. As for nonspecific strategies, researchers have explored using interferon-α and γ, lymphokine-activated killer cells, tumor necrosis factor, and antibodies bound to radioactive isotopes. Id. While promising, these strategies are still experimental, with much research yet to be done before they can become part of a standard treatment regimen for HCC. Id. at 477.

[0016] From the foregoing, it is clear that procedures used for detecting, diagnosing, monitoring, staging, prognosticating, and preventing the recurrence of HCC are of critical importance to the outcome of the patient. Moreover, current procedures, while helpful in each of these analyses, are limited by their specificity, sensitivity, invasiveness, and/or their cost. As such, highly specific and sensitive procedures that would operate by way of detecting novel markers in cells, tissues, or bodily fluids, with minimal invasiveness and at a reasonable cost, would be highly desirable.

[0017] Accordingly, there is a great need for more sensitive and accurate methods for predicting whether a person is likely to develop HCC, for diagnosing HCC, for monitoring the progression of the disease, for staging HCC, for determining whether HCC has metastasized, and for imaging HCC. There is also a need for better treatment of HCC.

### SUMMARY OF THE INVENTION

[0018] The present invention solves many needs in the art by providing nucleic acid molecules, polypeptides and antibodies thereto, variants and derivatives of the nucleic acids and polypeptides, agonists and antagonists that may be used to identify, diagnose, monitor, stage, image and treat hepatic cancer and non-cancerous disease states in hepatic; identify and monitor hepatic tissue; and identify and design agonists and antagonists of polypeptides of the invention. The invention also provides gene therapy, methods for producing transgenic animals and cells, and methods for producing engineered hepatic tissue for treatment and research.

[0019] One aspect of the present invention relates to nucleic acid molecules that are specific to hepatic cells, hepatic tissue and/or the hepatic organ. These hepatic specific nucleic acids (HSNAs) may be a naturally occurring cDNA, genomic DNA, RNA, or a fragment of one of these nucleic acids, or may be a non-naturally occurring nucleic acid molecule. If the HSNA is genomic DNA, then the HSNA is a hepatic specific gene (HSG). If the HSNA is RNA, then it is a hepatic specific transcript encoded by a HSG. Due to alternative splicing and transcriptional modification one HSG may encode for multiple hepatic specific RNAs. In a preferred embodiment, the nucleic acid molecule encodes a polypeptide that is specific to hepatic. More preferred is a nucleic acid molecule that encodes a polypeptide comprising an amino acid sequence of SEQ ID NO: 410-611. In another preferred embodiment, the nucleic acid molecule comprises a nucleic acid sequence of SEQ ID NO: 1-409. For the HSNA sequences listed herein, DEX0374_{—}001.nt.1 corresponds to SEQ ID NO: 1. For sequences with multiple splice variants, the parent sequence DEX0374_{—}001.nt.1, will be followed by DEX0374_{—}001.nt.2, etc. for each splice variant. The sequences off the corresponding peptides are listed as DEX0374_{—}001.aa. 1, etc. For the mapping of all of the nucleotides and peptides, see the table in the Example 1 section below.

[0020] This aspect of the present invention also relates to nucleic acid molecules that selectively hybridize or exhibit substantial sequence similarity to nucleic acid molecules encoding a Hepatic Specific Protein (HSP), or that selectively hybridize or exhibit substantial sequence similarity to a HSNA. In one embodiment of the present invention the nucleic acid molecule comprises an allelic variant of a nucleic acid molecule encoding a HSP, or an allelic variant of a HSNA. In another embodiment, the nucleic acid molecule comprises a part of a nucleic acid sequence that encodes a HSP or a part of a nucleic acid sequence of a HSNA.

[0021] In addition, this aspect of the present invention relates to a nucleic acid molecule further comprising one or more expression control sequences controlling the transcription and/or translation of all or a part of a HSNA or the transcription and/or translation of a nucleic acid molecule that encodes all or a fragment of a HSP.

[0022] Another aspect of the present invention relates to vectors and/or host cells comprising a nucleic acid molecule of this invention. In a preferred embodiment, the nucleic acid molecule of the vector and/or host cell encodes all or a fragment of a HSP. In another preferred embodiment, the nucleic acid molecule of the vector and/or host cell comprises all or a part of a HSNA. Vectors and host cells of the present invention are useful in the recombinant production of polypeptides, particularly HSPs of the present invention.

[0023] Another aspect of the present invention relates to polypeptides encoded by a nucleic acid molecule of this invention. The polypeptide may comprise either a fragment or a full-length protein. In a preferred embodiment, the polypeptide is a HSP. However, this aspect of the present invention also relates to mutant proteins (muteins) of HSPs, fusion proteins of which a portion is a HSP, and proteins and polypeptides encoded by allelic variants of a HSNA as provided herein.

[0024] Another aspect of the present invention relates to antibodies and other binders that specifically binds to a polypeptide of the instant invention. Accordingly antibodies or binders of the present specifically bind to HSPs, muteins, fusion proteins, and/or homologous proteins or a polypeptides encoded by allelic variants of an HSNA as provided herein.

[0025] Another aspect of the present invention relates to agonists and antagonists of the nucleic acid molecules and polypeptides of this invention. The agonists and antagonists of the instant invention may be used to treat hepatic cancer and non-cancerous disease states in hepatic and to produce engineered hepatic tissue.

[0026] Another aspect of the present invention relates to methods for using the nucleic acid molecules to detect or amplify nucleic acid molecules that have similar or identical nucleic acid sequences compared to the nucleic acid molecules described herein. Such methods are useful in identifying, diagnosing, monitoring, staging, imaging and treating hepatic cancer and non-cancerous disease states in hepatic. Such methods are also useful in identifying and/or monitoring hepatic tissue. In addition, measurement of levels of one or more of the nucleic acid molecules of this invention may be useful for diagnostics as part of panel in combination with known other markers, particularly those described in the hepatic cancer background section above.

[0027] Another aspect of the present invention relates to use of the nucleic acid molecules of this invention in gene therapy, for producing transgenic animals and cells, and for producing engineered hepatic tissue for treatment and research.

[0028] Another aspect of the present invention relates to methods for detecting polypeptides this invention, preferably using antibodies thereto. Such methods are useful to identify, diagnose, monitor, stage, image and treat hepatic cancer and non-cancerous disease states in hepatic. In addition, measurement of levels of one or more of the polypeptides of this invention may be useful to identify, diagnose, monitor, stage, image hepatic cancer in combination with known other markers, particularly those described in the hepatic cancer background section above. The polypeptides of the present invention can also be used to identify and/or monitor hepatic tissue, and to produce engineered hepatic tissue.

[0029] Yet another aspect of the present invention relates to a computer readable means of storing the nucleic acid and amino acid sequences of the invention. The records of the computer readable means can be accessed for reading and displaying of sequences for comparison, alignment and ordering of the sequences of the invention to other sequences. In addition, the computer records regarding the nucleic acid and/or amino acid sequences and/or measurements of their levels may be used alone or in combination with other markers to diagnose hepatic related diseases.

### DETAILED DESCRIPTION OF THE INVENTION

Definitions and General Techniques

[0030] Unless otherwise defined herein, scientific and technical terms used in connection with the present invention shall have the meanings that are commonly understood by those of ordinary skill in the art. Further, unless otherwise required by context, singular terms shall include pluralities and plural terms shall include the singular. Generally, nomenclatures used in connection with, and techniques of, cell and tissue culture, molecular biology, immunology, microbiology, genetics and protein and nucleic acid chemistry and hybridization described herein are those well known and commonly used in the art. The methods and techniques of the present invention are generally performed according to conventional methods well known in the art and as described in various general and more specific references that are cited and discussed throughout the present specification unless otherwise indicated. See, e.g., Sambrook et al., Molecular Cloning: A Laboratory Manual, 2d ed., Cold Spring Harbor Laboratory Press (1989) and Sambrook et al., Molecular Cloning: A Laboratory Manual, 3d ed., Cold Spring Harbor Press (2001); Ausubel et al., Current Protocols in Molecular Biology, Greene Publishing Associates (1992, and Supplements to 2000); Ausubel et al., Short Protocols in Molecular Biology: A Compendium of Methods from Current Protocols in Molecular Biology—4^{th} Ed., Wiley & Sons (1999); Harlow and Lane, Antibodies: A Laboratory Manual, Cold Spring Harbor Laboratory Press (1990); and Harlow and Lane, Using Antibodies: A Laboratory Manual, Cold Spring Harbor Laboratory Press (1999).

[0031] Enzymatic reactions and purification techniques are performed according to manufacturer's specifications, as commonly accomplished in the art or as described herein. The nomenclatures used in connection with, and the laboratory procedures and techniques of, analytical chemistry, synthetic organic chemistry, and medicinal and pharmaceutical chemistry described herein are those well known and commonly used in the art. Standard techniques are used for chemical syntheses, chemical analyses, pharmaceutical preparation, formulation, and delivery, and treatment of patients.

[0032] The following terms, unless otherwise indicated, shall be understood to have the following meanings:

[0033] A “nucleic acid molecule” of this invention refers to a polymeric form of nucleotides and includes both sense and antisense strands of RNA, cDNA, genomic DNA, and synthetic forms and mixed polymers of the above. A nucleotide refers to a ribonucleotide, deoxynucleotide or a modified form of either type of nucleotide. A “nucleic acid molecule” as used herein is synonymous with “nucleic acid” and “polynucleotide.” The term “nucleic acid molecule” usually refers to a molecule of at least 10 bases in length, unless otherwise specified. The term includes single and double stranded forms of DNA. In addition, a polynucleotide may include either or both naturally occurring and modified nucleotides linked together by naturally occurring and/or non-naturally occurring nucleotide linkages.

[0034] Nucleotides are represented by single letter symbols in nucleic acid molecule sequences. The following table lists symbols identifying nucleotides or groups of nucleotides which may occupy the symbol position on a nucleic acid molecule. See Nomenclature Committee of the International Union of Biochemistry (NC-IUB), Nomenclature for incompletely specified bases in nucleic acid sequences, Recommendations 1984., Eur J Biochem. 150(1):1-5 (1985).

| | | | Complementary |
|---|---|---|---|
| Symbol | Meaning | Group/Origin of Designation | Symbol |
| a | a | Adenine | t/u |
| g | g | Guanine | c |
| c | c | Cytosine | g |
| t | t | Thymine | a |
| u | u | Uracil | a |
| r | g or a | puRine | y |
| y | t/u or c | pYrimidine | r |
| m | a or c | aMino | k |
| k | g or t/u | Keto | m |
| s | g or c | Strong interactions 3H-bonds | w |
| w | a or t/u | Weak interactions 2H-bonds | s |
| b | g or c or t/u | not a | v |
| d | a or g or t/u | not c | h |
| h | a or c or t/u | not g | d |
| v | a or g or c | not t, not u | b |
| n | a or g or c | aNy | n |
| | or t/u, | | |
| | unknown, or | | |
| | other | | |

[0035] The nucleic acid molecules may be modified chemically or biochemically or may contain non-natural or derivatized nucleotide bases, as will be readily appreciated by those of skill in the art. Such modifications include, for example, labels, methylation, substitution of one or more of the naturally occurring nucleotides with an analog, internucleotide modifications such as uncharged linkages (e.g., methyl phosphonates, phosphotriesters, phosphoramidates, carbamates, etc.), charged linkages (e.g., phosphorothioates, phosphorodithioates, etc.), pendent moieties (e.g., polypeptides), intercalators (e.g., acridine, psoralen, etc.), chelators, alkylators, and modified linkages (e.g., alpha anomeric nucleic acids, etc.) The term “nucleic acid molecule” also includes any topological conformation, including single-stranded, double-stranded, partially duplexed, triplexed, hairpinned, circular and padlocked conformations. Also included are synthetic molecules that mimic polynucleotides in their ability to bind to a designated sequence via hydrogen bonding and other chemical interactions. Such molecules are known in the art and include, for example, those in which peptide linkages substitute for phosphate linkages in the backbone of the molecule.

[0036] A “gene” is defined as a nucleic acid molecule that comprises a nucleic acid sequence that encodes a polypeptide and the expression control sequences that surround the nucleic acid sequence that encodes the polypeptide. For instance, a gene may comprise a promoter, one or more enhancers, a nucleic acid sequence that encodes a polypeptide, downstream regulatory sequences and, possibly, other nucleic acid sequences involved in regulation of the expression of an RNA. As is well known in the art, eukaryotic genes usually contain both exons and introns. The term “exon” refers to a nucleic acid sequence found in genomic DNA that is bioinformatically predicted and/or experimentally confirmed to contribute contiguous sequence to a mature mRNA transcript. The term “intron” refers to a nucleic acid sequence found in genomic DNA that is predicted and/or confirmed to not contribute to a mature mRNA transcript, but rather to be “spliced out” during processing of the transcript.

[0037] A nucleic acid molecule or polypeptide is “derived” from a particular species if the nucleic acid molecule or polypeptide has been isolated from the particular species, or if the nucleic acid molecule or polypeptide is homologous to a nucleic acid molecule or polypeptide isolated from a particular species.

[0038] An “isolated” or “substantially pure” nucleic acid or polynucleotide (e.g., an RNA, DNA or a mixed polymer) is one which is substantially separated from other cellular components that naturally accompany the native polynucleotide in its natural host cell, e.g., ribosomes, polymerases, or genomic sequences with which it is naturally associated. The term embraces a nucleic acid or polynucleotide that (1) has been removed from its naturally occurring environment, (2) is not associated with all or a portion of a polynucleotide in which the “isolated polynucleotide” is found in nature, (3) is operatively linked to a polynucleotide which it is not linked to in nature, (4) does not occur in nature as part of a larger sequence or (5) includes nucleotides or internucleoside bonds that are not found in nature. The term “isolated” or “substantially pure” also can be used in reference to recombinant or cloned DNA isolates, chemically synthesized polynucleotide analogs, or polynucleotide analogs that are biologically synthesized by heterologous systems. The term “isolated nucleic acid molecule” includes nucleic acid molecules that are integrated into a host cell chromosome at a heterologous site, recombinant fusions of a native fragment to a heterologous sequence, recombinant vectors present as episomes or as integrated into a host cell chromosome.

[0039] A “part” of a nucleic acid molecule refers to a nucleic acid molecule that comprises a partial contiguous sequence of at least 10 bases of the reference nucleic acid molecule. Preferably, a part comprises at least 15 to 20 bases of a reference nucleic acid molecule. In theory, a nucleic acid sequence of 17 nucleotides is of sufficient length to occur at random less frequently than once in the three gigabase human genome, and thus to provide a nucleic acid probe that can uniquely identify the reference sequence in a nucleic acid mixture of genomic complexity. A preferred part is one that comprises a nucleic acid sequence that can encode at least 6 contiguous amino acid sequences (fragments of at least 18 nucleotides) because they are useful in directing the expression or synthesis of peptides that are useful in mapping the epitopes of the polypeptide encoded by the reference nucleic acid. See, e.g., Geysen et al., Proc. Natl. Acad. Sci. USA 81:3998-4002 (1984); and U.S. Pat. Nos. 4,708,871 and 5,595,915, the disclosures of which are incorporated herein by reference in their entireties. A part may also comprise at least 25, 30, 35 or 40 nucleotides of a reference nucleic acid molecule, or at least 50, 60, 70, 80, 90, 100, 150, 200, 250, 300, 350, 400 or 500 nucleotides of a reference nucleic acid molecule. A part of a nucleic acid molecule may comprise no other nucleic acid sequences. Alternatively, a part of a nucleic acid may comprise other nucleic acid sequences from other nucleic acid molecules.

[0040] The term “oligonucleotide” refers to a nucleic acid molecule generally comprising a length of 200 bases or fewer. The term often refers to single-stranded deoxyribonucleotides, but it can refer as well to single- or double-stranded ribonucleotides, RNA:DNA hybrids and double-stranded DNAs, among others. Preferably, oligonucleotides are 10 to 60 bases in length and most preferably 12, 13, 14, 15, 16, 17, 18, 19 or 20 bases in length. Other preferred oligonucleotides are 25, 30, 35, 40, 45, 50, 55 or 60 bases in length. Oligonucleotides may be single-stranded, e.g. for use as probes or primers, or may be double-stranded, e.g. for use in the construction of a mutant gene. Oligonucleotides of the invention can be either sense or antisense oligonucleotides. An oligonucleotide can be derivatized or modified as discussed above for nucleic acid molecules.

[0041] Oligonucleotides, such as single-stranded DNA probe oligonucleotides, often are synthesized by chemical methods, such as those implemented on automated oligonucleotide synthesizers. However, oligonucleotides can be made by a variety of other methods, including in vitro recombinant DNA-mediated techniques and by expression of DNAs in cells and organisms. Initially, chemically synthesized DNAs typically are obtained without a 5′ phosphate. The 5′ ends of such oligonucleotides are not substrates for phosphodiester bond formation by ligation reactions that employ DNA ligases typically used to form recombinant DNA molecules. Where ligation of such oligonucleotides is desired, a phosphate can be added by standard techniques, such as those that employ a kinase and ATP. The 3′ end of a chemically synthesized oligonucleotide generally has a free hydroxyl group and, in the presence of a ligase, such as T4 DNA ligase, readily will form a phosphodiester bond with a 5′ phosphate of another polynucleotide, such as another oligonucleotide. As is well known, this reaction can be prevented selectively, where desired, by removing the 5′ phosphates of the other polynucleotide(s) prior to ligation.

[0042] The term “naturally occurring nucleotide” referred to herein includes naturally occurring deoxyribonucleotides and ribonucleotides. The term “modified nucleotides” referred to herein includes nucleotides with modified or substituted sugar groups and the like. The term “nucleotide linkages” referred to herein includes nucleotides linkages such as phosphorothioate, phosphorodithioate, phosphoroselenoate, phosphorodiselenoate, phosphoroanilothioate, phoshoraniladate, phosphoroamidate, and the like. See e.g., LaPlanche et al. Nucl. Acids Res. 14:9081-9093 (1986); Stein et al. Nucl. Acids Res. 16:3209-3221 (1988); Zon et al. Anti-Cancer Drug Design 6:539-568 (1991); Zon et al., in Eckstein (ed.) Oligonucleotides and Analogues: A Practical Approach, pp. 87-108, Oxford University Press (1991); Uhlmann and Peyman Chemical Reviews 90:543 (1990), and U.S. Pat. No. 5,151,510, the disclosure of which is hereby incorporated by reference in its entirety.

[0043] Unless specified otherwise, the left hand end of a polynucleotide sequence in sense orientation is the 5′ end and the right hand end of the sequence is the 3′ end. In addition, the left hand direction of a polynucleotide sequence in sense orientation is referred to as the 5′ direction, while the right hand direction of the polynucleotide sequence is referred to as the 3′ direction. Further, unless otherwise indicated, each nucleotide sequence is set forth herein as a sequence of deoxyribonucleotides. It is intended, however, that the given sequence be interpreted as would be appropriate to the polynucleotide composition: for example, if the isolated nucleic acid is composed of RNA, the given sequence intends ribonucleotides, with uridine substituted for thymidine.

[0044] The term “allelic variant” refers to one of two or more alternative naturally occurring forms of a gene, wherein each gene possesses a unique nucleotide sequence. In a preferred embodiment, different alleles of a given gene have similar or identical biological properties.

[0045] The term “percent sequence identity” in the context of nucleic acid sequences refers to the residues in two sequences which are the same when aligned for maximum correspondence. The length of sequence identity comparison may be over a stretch of at least about nine nucleotides, usually at least about 20 nucleotides, more usually at least about 24 nucleotides, typically at least about 28 nucleotides, more typically at least about 32 nucleotides, and preferably at least about 36 or more nucleotides. There are a number of different algorithms known in the art which can be used to measure nucleotide sequence identity. For instance, polynucleotide sequences can be compared using FASTA, Gap or Bestfit, which are programs in Wisconsin Package Version 10.0, Genetics Computer Group (GCG), Madison, Wis. FASTA, which includes, e.g., the programs FASTA2 and FASTA3, provides alignments and percent sequence identity of the regions of the best overlap between the query and search sequences (Pearson, Methods Enzymol. 183: 63-98 (1990); Pearson, Methods Mol. Biol. 132: 185-219 (2000); Pearson, Methods Enzymol. 266: 227-258 (1996); Pearson, J. Mol. Biol. 276: 71-84 (1998)). Unless otherwise specified, default parameters for a particular program or algorithm are used. For instance, percent sequence identity between nucleic acid sequences can be determined using FASTA with its default parameters (a word size of 6 and the NOPAM factor for the scoring matrix) or using Gap with its default parameters as provided in GCG Version 6.1.

[0046] A reference to a nucleic acid sequence encompasses its complement unless otherwise specified. Thus, a reference to a nucleic acid molecule having a particular sequence should be understood to encompass its complementary strand, with its complementary sequence. The complementary strand is also useful, e.g., for antisense therapy, double stranded RNA (dsRNA) inhibition (RNAi), combination of triplex and antisense, hybridization probes and PCR primers.

[0047] In the molecular biology art, researchers use the terms “percent sequence identity”, “percent sequence similarity” and “percent sequence homology” interchangeably. In this application, these terms shall have the same meaning with respect to nucleic acid sequences only.

[0048] The term “substantial similarity” or “substantial sequence similarity,” when referring to a nucleic acid or fragment thereof, indicates that, when optimally aligned with appropriate nucleotide insertions or deletions with another nucleic acid (or its complementary strand), there is nucleotide sequence identity in at least about 50%, more preferably 60% of the nucleotide bases, usually at least about 70%, more usually at least about 80%, preferably at least about 90%, and more preferably at least about 95-98% of the nucleotide bases, as measured by any well known algorithm of sequence identity, such as FASTA, BLAST or Gap, as discussed above.

[0049] Alternatively, substantial similarity exists between a first and second nucleic acid sequence when the first nucleic acid sequence or fragment thereof hybridizes to an antisense strand of the second nucleic acid, under selective hybridization conditions. Typically, selective hybridization will occur between the first nucleic acid sequence and an antisense strand of the second nucleic acid sequence when there is at least about 55% sequence identity between the first and second nucleic acid sequences—preferably at least about 65%, more preferably at least about 75%, and most preferably at least about 90%—over a stretch of at least about 14 nucleotides, more preferably at least 17 nucleotides, even more preferably at least 20, 25, 30, 35, 40, 50, 60, 70, 80, 90 or 100 nucleotides.

[0050] Nucleic acid hybridization will be affected by such conditions as salt concentration, temperature, solvents, the base composition of the hybridizing species, length of the complementary regions, and the number of nucleotide base mismatches between the hybridizing nucleic acids, as will be readily appreciated by those skilled in the art. “Stringent hybridization conditions” and “stringent wash conditions” in the context of nucleic acid hybridization experiments depend upon a number of different physical parameters. The most important parameters include temperature of hybridization, base composition of the nucleic acids, salt concentration and length of the nucleic acid. One having ordinary skill in the art knows how to vary these parameters to achieve a particular stringency of hybridization. In general, “stringent hybridization” is performed at about 25° C. below the thermal melting point (Tₘ) for the specific DNA hybrid under a particular set of conditions. “Stringent washing” is performed at temperatures about 5° C. lower than the Tₘ for the specific DNA hybrid under a particular set of conditions. The Tₘ is the temperature at which 50% of the target sequence hybridizes to a perfectly matched probe. See Sambrook (1989), supra, p. 9.51.

[0051] The Tₘ for a particular DNA-DNA hybrid can be estimated by the formula:
Tₘ=81.5° C.+16.6(log₁₀[Na⁺])+0.41(fraction G+C)−0.63(% formamide)−(600/l) where l is the length of the hybrid in base pairs.

[0052] The Tₘ for a particular RNA-RNA hybrid can be estimated by the formula:
Tₘ=79.8° C.+18.5(log₁₀[Na⁺])+0.58(fraction G+C)+11.8(fraction G+C)²−0.35(% formamide)−(820/l).

[0053] The Tₘ for a particular RNA-DNA hybrid can be estimated by the formula:
Tₘ=79.8° C.+18.5(log₁₀[Na⁺])+0.58(fraction G+C)+11.8(fraction G+C)²−0.50(% formamide)−(820/l).

[0054] In general, the Tₘ decreases by 1-1.5° C. for each 1% of mismatch between two nucleic acid sequences. Thus, one having ordinary skill in the art can alter hybridization and/or washing conditions to obtain sequences that have higher or lower degrees of sequence identity to the target nucleic acid. For instance, to obtain hybridizing nucleic acids that contain up to 10% mismatch from the target nucleic acid sequence, 10-15° C. would be subtracted from the calculated Tₘ of a perfectly matched hybrid, and then the hybridization and washing temperatures adjusted accordingly. Probe sequences may also hybridize specifically to duplex DNA under certain conditions to form triplex or other higher order DNA complexes. The preparation of such probes and suitable hybridization conditions are well known in the art.

[0055] An example of stringent hybridization conditions for hybridization of complementary nucleic acid sequences having more than 100 complementary residues on a filter in a Southern or Northern blot or for screening a library is 50% formamide/6×SSC at 42° C. for at least ten hours and preferably overnight (approximately 16 hours). Another example of stringent hybridization conditions is 6×SSC at 68° C. without formamide for at least ten hours and preferably overnight. An example of moderate stringency hybridization conditions is 6×SSC at 55° C. without formamide for at least ten hours and preferably overnight. An example of low stringency hybridization conditions for hybridization of complementary nucleic acid sequences having more than 100 complementary residues on a filter in a Southern or northern blot or for screening a library is 6×SSC at 42° C. for at least ten hours. Hybridization conditions to identify nucleic acid sequences that are similar but not identical can be identified by experimentally changing the hybridization temperature from 68° C. to 42° C. while keeping the salt concentration constant (6×SSC), or keeping the hybridization temperature and salt concentration constant (e.g. 42° C. and 6×SSC) and varying the formamide concentration from 50% to 0%. Hybridization buffers may also include blocking agents to lower background. These agents are well known in the art. See Sambrook et al. (1989), supra, pages 8.46 and 9.46-9.58. See also Ausubel (1992), supra, Ausubel (1999), supra, and Sambrook (2001), supra.

[0056] Wash conditions also can be altered to change stringency conditions. An example of stringent wash conditions is a 0.2×SSC wash at 65° C. for 15 minutes (see Sambrook (1989), supra, for SSC buffer). Often the high stringency wash is preceded by a low stringency wash to remove excess probe. An exemplary medium stringency wash for duplex DNA of more than 100 base pairs is 1×SSC at 45° C. for 15 minutes. An exemplary low stringency wash for such a duplex is 4×SSC at 40° C. for 15 minutes. In general, signal-to-noise ratio of 2× or higher than that observed for an unrelated probe in the particular hybridization assay indicates detection of a specific hybridization.

[0057] As defined herein, nucleic acids that do not hybridize to each other under stringent conditions are still substantially similar to one another if they encode polypeptides that are substantially identical to each other. This occurs, for example, when a nucleic acid is created synthetically or recombinantly using a high codon degeneracy as permitted by the redundancy of the genetic code.

[0058] Hybridization conditions for nucleic acid molecules that are shorter than 100 nucleotides in length (e.g., for oligonucleotide probes) may be calculated by the formula:
Tₘ=81.5° C.+16.6(log₁₀[Na⁺])+0.41(fraction G+C)−(600/N),
wherein N is change length and the [Na⁺] is 1 M or less. See Sambrook (1989), supra, p. 11.46. For hybridization of probes shorter than 100 nucleotides, hybridization is usually performed under stringent conditions (5-10° C. below the Tₘ) using high concentrations (0.1-1.0 pmol/ml) of probe. Id. at p. 11.45. Determination of hybridization using mismatched probes, pools of degenerate probes or “guessmers,” as well as hybridization solutions and methods for empirically determining hybridization conditions are well known in the art. See, e.g., Ausubel (1999), supra; Sambrook (1989), supra, pp. 11.45-11.57.

[0059] The term “digestion” or “digestion of DNA” refers to catalytic cleavage of the DNA with a restriction enzyme that acts only at certain sequences in the DNA. The various restriction enzymes referred to herein are commercially available and their reaction conditions, cofactors and other requirements for use are known and routine to the skilled artisan. For analytical purposes, typically, 1 μg of plasmid or DNA fragment is digested with about 2 units of enzyme in about 20 μl of reaction buffer. For the purpose of isolating DNA fragments for plasmid construction, typically 5 to 50 μg of DNA are digested with 20 to 250 units of enzyme in proportionately larger volumes. Appropriate buffers and substrate amounts for particular restriction enzymes are described in standard laboratory manuals, such as those referenced below, and are specified by commercial suppliers. Incubation times of about 1 hour at 37° C. are ordinarily used, but conditions may vary in accordance with standard procedures, the supplier's instructions and the particulars of the reaction. After digestion, reactions may be analyzed, and fragments may be purified by electrophoresis through an agarose or polyacrylamide gel, using well known methods that are routine for those skilled in the art.

[0060] The term “ligation” refers to the process of forming phosphodiester bonds between two or more polynucleotides, which most often are double-stranded DNAs. Techniques for ligation are well known to the art and protocols for ligation are described in standard laboratory manuals and references, such as, e.g., Sambrook (1989), supra.

[0061] Genome-derived “single exon probes,” are probes that comprise at least part of an exon (“reference exon”) and can hybridize detectably under high stringency conditions to transcript-derived nucleic acids that include the reference exon but do not hybridize detectably under high stringency conditions to nucleic acids that lack the reference exon. Single exon probes typically further comprise, contiguous to a first end of the exon portion, a first intronic and/or intergenic sequence that is identically contiguous to the exon in the genome, and may contain a second intronic and/or intergenic sequence that is identically contiguous to the exon in the genome. The minimum length of genome-derived single exon probes is defined by the requirement that the exonic portion be of sufficient length to hybridize under high stringency conditions to transcript-derived nucleic acids, as discussed above. The maximum length of genome-derived single exon probes is defined by the requirement that the probes contain portions of no more than one exon. The single exon probes may contain priming sequences not found in contiguity with the rest of the probe sequence in the genome, which priming sequences are useful for PCR and other amplification-based technologies. In another aspect, the invention is directed to single exon probes based on the HSNAs disclosed herein.

[0062] In one embodiment, the term “microarray” refers to a “nucleic acid microarray” having a substrate-bound plurality of nucleic acids, hybridization to each of the plurality of bound nucleic acids being separately detectable. The substrate can be solid or porous, planar or non-planar, unitary or distributed. Nucleic acid microarrays include all the devices so called in Schena (ed.), DNA Microarrays: A Practical Approach (Practical Approach Series), Oxford University Press (1999); Nature Genet. 21(1)(suppl.): 1-60 (1999); Schena (ed.), Microarray Biochip: Tools and Technology, Eaton Publishing Company/BioTechniques Books Division (2000). Additionally, these nucleic acid microarrays include substrate-bound plurality of nucleic acids in which the plurality of nucleic acids are disposed on a plurality of beads, rather than on a unitary planar substrate, as is described, inter alia, in Brenner et al., Proc. Natl. Acad. Sci. USA 97(4): 1665-1670 (2000). Examples of nucleic acid microarrays may be found in U.S. Pat. Nos. 6,391,623, 6,383,754, 6,383,749, 6,380,377, 6,379,897, 6,376,191, 6,372,431, 6,351,712 6,344,316, 6,316,193, 6,312,906, 6,309,828, 6,309,824, 6,306,643, 6,300,063, 6,287,850, 6,284,497, 6,284,465, 6,280,954, 6,262,216, 6,251,601, 6,245,518, 6,263,287, 6,251,601, 6,238,866, 6,228,575, 6,214,587, 6,203,989, 6,171,797, 6,103,474, 6,083,726, 6,054,274, 6,040,138, 6,083,726, 6,004,755, 6,001,309, 5,958,342, 5,952,180, 5,936,731, 5,843,655, 5,814,454, 5,837,196, 5,436,327, 5,412,087, 5,405,783, the disclosures of which are incorporated herein by reference in their entireties.

[0063] In an alternative embodiment, a “microarray” may also refer to a “peptide microarray” or “protein microarray” having a substrate-bound collection of plurality of polypeptides, the binding to each of the plurality of bound polypeptides being separately detectable. Alternatively, the peptide microarray, may have a plurality of binders, including but not limited to monoclonal antibodies, polyclonal antibodies, phage display binders, yeast 2 hybrid binders, aptamers, which can specifically detect the binding of the polypeptides of this invention. The array may be based on autoantibody detection to the polypeptides of this invention, see Robinson et al., Nature Medicine 8(3):295-301 (2002). Examples of peptide arrays may be found in WO 02/31463, WO 02/25288, WO 01/94946, WO 01/88162, WO 01/68671, WO 01/57259, WO 00/61806, WO 00/54046, WO 00/47774, WO 99/40434, WO 99/39210, WO 97/42507 and U.S. Pat. Nos. 6,268,210, 5,766,960, 5,143,854, the disclosures of which are incorporated herein by reference in their entireties.

[0064] In addition, determination of the levels of the HSNA or HSP may be made in a multiplex manner using techniques described in WO 02/29109, WO 02/24959, WO 01/83502, WO01/73113, WO 01/59432, WO 01/57269, WO 99/67641, the disclosures of which are incorporated herein by reference in their entireties.

[0065] The term “mutant”, “mutated”, or “mutation” when applied to nucleic acid sequences means that nucleotides in a nucleic acid sequence may be inserted, deleted or changed compared to a reference nucleic acid sequence. A single alteration may be made at a locus (a point mutation) or multiple nucleotides may be inserted, deleted or changed at a single locus. In addition, one or more alterations may be made at any number of loci within a nucleic acid sequence. In a preferred embodiment of the present invention, the nucleic acid sequence is the wild type nucleic acid sequence encoding a HSP or is a HSNA. The nucleic acid sequence may be mutated by any method known in the art including those mutagenesis techniques described infra.

[0066] The term “error-prone PCR” refers to a process for performing PCR under conditions where the copying fidelity of the DNA polymerase is low, such that a high rate of point mutations is obtained along the entire length of the PCR product. See, e.g. Leung et al., Technique 1: 11-15 (1989) and Caldwell et al., PCR Methods Applic. 2: 28-33 (1992).

[0067] The term “oligonucleotide-directed mutagenesis” refers to a process which enables the generation of site-specific mutations in any cloned DNA segment of interest. See, e.g., Reidhaar-Olson et al., Science 241: 53-57 (1988).

[0068] The term “assembly PCR” refers to a process which involves the assembly of a PCR product from a mixture of small DNA fragments. A large number of different PCR reactions occur in parallel in the same vial, with the products of one reaction priming the products of another reaction.

[0069] The term “sexual PCR mutagenesis” or “DNA shuffling” refers to a method of error-prone PCR coupled with forced homologous recombination between DNA molecules of different but highly related DNA sequence in vitro, caused by random fragmentation of the DNA molecule based on sequence similarity, followed by fixation of the crossover by primer extension in an error-prone PCR reaction. See, e.g., Stemmer, Proc. Natl. Acad. Sci. U.S.A. 91: 10747-10751 (1994). DNA shuffling can be carried out between several related genes (“Family shuffling”).

[0070] The term “in vivo mutagenesis” refers to a process of generating random mutations in any cloned DNA of interest which involves the propagation of the DNA in a strain of bacteria such as E. coli that carries mutations in one or more of the DNA repair pathways. These “mutator” strains have a higher random mutation rate than that of a wild-type parent. Propagating the DNA in a mutator strain will eventually generate random mutations within the DNA.

[0071] The term “cassette mutagenesis” refers to any process for replacing a small region of a double-stranded DNA molecule with a synthetic oligonucleotide “cassette” that differs from the native sequence. The oligonucleotide often contains completely and/or partially randomized native sequence.

[0072] The term “recursive ensemble mutagenesis” refers to an algorithm for protein engineering (protein mutagenesis) developed to produce diverse populations of phenotypically related mutants whose members differ in amino acid sequence. This method uses a feedback mechanism to control successive rounds of combinatorial cassette mutagenesis. See, e.g., Arkin et al., Proc. Natl. Acad. Sci. U.S.A. 89: 7811-7815 (1992).

[0073] The term “exponential ensemble mutagenesis” refers to a process for generating combinatorial libraries with a high percentage of unique and functional mutants, wherein small groups of residues are randomized in parallel to identify, at each altered position, amino acids which lead to functional proteins. See, e.g., Delegrave et al., Biotechnology Research 11: 1548-1552 (1993); Arnold, Current Opinion in Biotechnology 4: 450-455 (1993).

[0074] “Operatively linked” expression control sequences refers to a linkage in which the expression control sequence is either contiguous with the gene of interest to control the gene of interest, or acts in trans or at a distance to control the gene of interest.

[0075] The term “expression control sequence” as used herein refers to polynucleotide sequences which are necessary to affect the expression of coding sequences to which they are operatively linked. Expression control sequences are sequences which control the transcription, post-transcriptional events and translation of nucleic acid sequences. Expression control sequences include appropriate transcription initiation, termination, promoter and enhancer sequences; efficient RNA processing signals such as splicing and polyadenylation signals; sequences that stabilize cytoplasmic mRNA; sequences that enhance translation efficiency (e.g., ribosome binding sites); sequences that enhance protein stability; and when desired, sequences that enhance protein secretion. The nature of such control sequences differs depending upon the host organism; in prokaryotes, such control sequences generally include promoter, ribosomal binding site, and transcription termination sequence. The term “control sequences” is intended to include, at a minimum, all components whose presence is essential for expression, and can also include additional components whose presence is advantageous, for example, leader sequences and fusion partner sequences.

[0076] The term “vector,” as used herein, is intended to refer to a nucleic acid molecule capable of transporting another nucleic acid to which it has been linked. One type of vector is a “plasmid”, which refers to a circular double stranded DNA loop into which additional DNA segments may be ligated. Other vectors include cosmids, bacterial artificial chromosomes (BAC) and yeast artificial chromosomes (YAC). Another type of vector is a viral vector, wherein additional DNA segments may be ligated into the viral genome. Viral vectors that infect bacterial cells are referred to as bacteriophages. Certain vectors are capable of autonomous replication in a host cell into which they are introduced (e.g., bacterial vectors having a bacterial origin of replication). Other vectors can be integrated into the genome of a host cell upon introduction into the host cell, and thereby are replicated along with the host genome. Moreover, certain vectors are capable of directing the expression of genes to which they are operatively linked. Such vectors are referred to herein as “recombinant expression vectors” (or simply, “expression vectors”). In general, expression vectors of utility in recombinant DNA techniques are often in the form of plasmids. In the present specification, “plasmid” and “vector” may be used interchangeably as the plasmid is the most commonly used form of vector. However, the invention is intended to include other forms of expression vectors that serve equivalent functions.

[0077] The term “recombinant host cell” (or simply “host cell”), as used herein, is intended to refer to a cell into which a recombinant expression vector has been introduced. It should be understood that such terms are intended to refer not only to the particular subject cell but to the progeny of such a cell. Because certain modifications may occur in succeeding generations due to either mutation or environmental influences, such progeny may not, in fact, be identical to the parent cell, but are still included within the scope of the term “host cell” as used herein.

[0078] As used herein, the phrase “open reading frame” and the equivalent acronym “ORF” refers to that portion of a transcript-derived nucleic acid that can be translated in its entirety into a sequence of contiguous amino acids. As so defined, an ORF has length, measured in nucleotides, exactly divisible by 3. As so defined, an ORF need not encode the entirety of a natural protein.

[0079] As used herein, the phrase “ORF-encoded peptide” refers to the predicted or actual translation of an ORF.

[0080] As used herein, the phrase “degenerate variant” of a reference nucleic acid sequence is meant to be inclusive of all nucleic acid sequences that can be directly translated, using the standard genetic code, to provide an amino acid sequence identical to that translated from the reference nucleic acid sequence.

[0081] The term “polypeptide” encompasses both naturally occurring and non-naturally occurring proteins and polypeptides, as well as polypeptide fragments and polypeptide mutants, derivatives and analogs thereof. A polypeptide may be monomeric or polymeric. Further, a polypeptide may comprise a number of different modules within a single polypeptide each of which has one or more distinct activities. A preferred polypeptide in accordance with the invention comprises a HSP encoded by a nucleic acid molecule of the instant invention, or a fragment, mutant, analog and derivative thereof.

[0082] The term “isolated protein” or “isolated polypeptide” is a protein or polypeptide that by virtue of its origin or source of derivation (1) is not associated with naturally associated components that accompany it in its native state, (2) is free of other proteins from the same species (3) is expressed by a cell from a different species, or (4) does not occur in nature. Thus, a polypeptide that is chemically synthesized or synthesized in a cellular system different from the cell from which it naturally originates will be “isolated” from its naturally associated components. A polypeptide or protein may also be rendered substantially free of naturally associated components by isolation, using protein purification techniques well known in the art.

[0083] A protein or polypeptide is “substantially pure,” “substantially homogeneous” or “substantially purified” when at least about 60% to 75% of a sample exhibits a single species of polypeptide. The polypeptide or protein may be monomeric or multimeric. A substantially pure polypeptide or protein will typically comprise about 50%, 60%, 70%, 80% or 90% W/W of a protein sample, more usually about 95%, and preferably will be over 99% pure. Protein purity or homogeneity may be determined by a number of means well known in the art, such as polyacrylamide gel electrophoresis of a protein sample, followed by visualizing a single polypeptide band upon staining the gel with a stain well known in the art. For certain purposes, higher resolution may be provided by using HPLC or other means well known in the art for purification.

[0084] The term “fragment” when used herein with respect to polypeptides of the present invention refers to a polypeptide that has an amino-terminal and/or carboxy-terminal deletion compared to a full-length HSP. In a preferred embodiment, the fragment is a contiguous sequence in which the amino acid sequence of the fragment is identical to the corresponding positions in the naturally occurring polypeptide. Fragments typically are at least 5, 6, 7, 8, 9 or 10 amino acids long, preferably at least 12, 14, 16 or 18 amino acids long, more preferably at least 20 amino acids long, more preferably at least 25, 30, 35, 40 or 45, amino acids, even more preferably at least 50 or 60 amino acids long, and even more preferably at least 70 amino acids long.

[0085] A “derivative” when used herein with respect to polypeptides of the present invention refers to a polypeptide which is substantially similar in primary structural sequence to a HSP but which include, e.g., in vivo or in vitro chemical and biochemical modifications that are not found in the HSP. Such modifications include, for example, acetylation, acylation, ADP-ribosylation, amidation, covalent attachment of flavin, covalent attachment of a heme moiety, covalent attachment of a nucleotide or nucleotide derivative, covalent attachment of a lipid or lipid derivative, covalent attachment of phosphotidylinositol, cross-linking, cyclization, disulfide bond formation, demethylation, formation of covalent cross-links, formation of cystine, formation of pyroglutamate, formylation, gamma-carboxylation, glycosylation, GPI anchor formation, hydroxylation, iodination, methylation, myristoylation, oxidation, proteolytic processing, phosphorylation, prenylation, racemization, selenoylation, sulfation, transfer-RNA mediated addition of amino acids to proteins such as arginylation, and ubiquitination. Other modification include, e.g., labeling with radionuclides, and various enzymatic modifications, as will be readily appreciated by those skilled in the art. A variety of methods for labeling polypeptides and of substituents or labels useful for such purposes are well known in the art, and include radioactive isotopes such as ¹²⁵I, ³²P, ³⁵S, ¹⁴C and ³H, ligands which bind to labeled antiligands (e.g., antibodies), fluorophores, chemiluminescent agents, enzymes, and antiligands which can serve as specific binding pair members for a labeled ligand. The choice of label depends on the sensitivity required, ease of conjugation with the primer, stability requirements, and available instrumentation. Methods for labeling polypeptides are well known in the art. See Ausubel (1992), supra; Ausubel (1999), supra.

[0086] The term “fusion protein” refers to polypeptides of the present invention coupled to a heterologous amino acid sequences. Fusion proteins are useful because they can be constructed to contain two or more desired functional elements from two or more different proteins. A fusion protein comprises at least 10 contiguous amino acids from a polypeptide of interest, more preferably at least 20 or 30 amino acids, even more preferably at least 40, 50 or 60 amino acids, yet more preferably at least 75, 100 or 125 amino acids. Fusion proteins can be produced recombinantly by constructing a nucleic acid sequence that encodes the polypeptide or a fragment thereof in frame with a nucleic acid sequence encoding a different protein or peptide and then expressing the fusion protein. Alternatively, a fusion protein can be produced chemically by crosslinking the polypeptide or a fragment thereof to another protein.

[0087] The term “analog” refers to both polypeptide analogs and non-peptide analogs. The term “polypeptide analog” as used herein refers to a polypeptide that is comprised of a segment of at least 25 amino acids that has substantial identity to a portion of an amino acid sequence but which contains non-natural amino acids or non-natural inter-residue bonds. In a preferred embodiment, the analog has the same or similar biological activity as the native polypeptide. Typically, polypeptide analogs comprise a conservative amino acid substitution (or insertion or deletion) with respect to the naturally occurring sequence. Analogs typically are at least 20 amino acids long, preferably at least 50 amino acids long or longer, and can often be as long as a full-length naturally occurring polypeptide.

[0088] The term “non-peptide analog” refers to a compound with properties that are analogous to those of a reference polypeptide. A non-peptide compound may also be termed a “peptide mimetic” or a “peptidomimetic.” Such compounds are often developed with the aid of computerized molecular modeling. Peptide mimetics that are structurally similar to useful peptides may be used to produce an equivalent effect. Generally, peptidomimetics are structurally similar to a paradigm polypeptide (i.e., a polypeptide that has a desired biochemical property or pharmacological activity), but have one or more peptide linkages optionally replaced by a linkage selected from the group consisting of: —CH₂NH—, —CH₂S—, —CH₂—CH₂—, —CH═CH—(cis and trans), —COCH₂—, —CH(OH)CH₂—, and CH₂SO—, by methods well known in the art. Systematic substitution of one or more amino acids of a consensus sequence with a D-amino acid of the same type (e.g., D-lysine in place of L-lysine) may also be used to generate more stable peptides. In addition, constrained peptides comprising a consensus sequence or a substantially identical consensus sequence variation may be generated by methods known in the art (Rizo et al., Ann. Rev. Biochem. 61: 387-418 (1992)). For example, one may add internal cysteine residues capable of forming intramolecular disulfide bridges which cyclize the peptide.

[0089] The term “mutant” or “mutein” when referring to a polypeptide of the present invention relates to an amino acid sequence containing substitutions, insertions or deletions of one or more amino acids compared to the amino acid sequence of a HSP. A mutein may have one or more amino acid point substitutions, in which a single amino acid at a position has been changed to another amino acid, one or more insertions and/or deletions, in which one or more amino acids are inserted or deleted, respectively, in the sequence of the naturally occurring protein, and/or truncations of the amino acid sequence at either or both the amino or carboxy termini. Further, a mutein may have the same or different biological activity as the naturally occurring protein. For instance, a mutein may have an increased or decreased biological activity. A mutein has at least 50% sequence similarity to the wild type protein, preferred is 60% sequence similarity, more preferred is 70% sequence similarity. Even more preferred are muteins having 80%, 85% or 90% sequence similarity to a HSP. In an even more preferred embodiment, a mutein exhibits 95% sequence identity, even more preferably 97%, even more preferably 98% and even more preferably 99%. Sequence similarity may be measured by any common sequence analysis algorithm, such as GAP or BESTFIT or other variation Smith-Waterman alignment. See, T. F. Smith and M. S. Waterman, J. Mol. Biol. 147:195-197 (1981) and W. R. Pearson, Genomics 11:635-650 (1991).

[0090] Preferred amino acid substitutions are those which: (1) reduce susceptibility to proteolysis, (2) reduce susceptibility to oxidation, (3) alter binding affinity for forming protein complexes, (4) alter binding affinity or enzymatic activity, and (5) confer or modify other physicochemical or functional properties of such analogs. For example, single or multiple amino acid substitutions (preferably conservative amino acid substitutions) may be made in the naturally occurring sequence (preferably in the portion of the polypeptide outside the domain(s) forming intermolecular contacts. In a preferred embodiment, the amino acid substitutions are moderately conservative substitutions or conservative substitutions. In a more preferred embodiment, the amino acid substitutions are conservative substitutions. A conservative amino acid substitution should not substantially change the structural characteristics of the parent sequence (e.g., a replacement amino acid should not tend to disrupt a helix that occurs in the parent sequence, or disrupt other types of secondary structure that characterizes the parent sequence). Examples of art-recognized polypeptide secondary and tertiary structures are described in Creighton (ed.), Proteins, Structures and Molecular Principles, W. H. Freeman and Company (1984); Branden et al. (ed.), Introduction to Protein Structure, Garland Publishing (1991); Thornton et al., Nature 354:105-106 (1991).

[0091] As used herein, the twenty conventional amino acids and their abbreviations follow conventional usage. See Golub et al. (eds.), Immunology—A Synthesis 2^{nd} Ed., Sinauer Associates (1991). Stereoisomers (e.g., D-amino acids) of the twenty conventional amino acids, unnatural amino acids such as α-,α-disubstituted amino acids, N-alkyl amino acids, and other unconventional amino acids may also be suitable components for polypeptides of the present invention. Examples of unconventional amino acids include: 4-hydroxyproline, γ-carboxyglutamate, ε-N,N,N-trimethyllysine, ε-N-acetyllysine, O-phosphoserine, N-acetylserine, N-formylmethionine, 3-methylhistidine, 5-hydroxylysine, s-N-methylarginine, and other similar amino acids and imino acids (e.g., 4-hydroxyproline). In the polypeptide notation used herein, the lefthand direction is the amino terminal direction and the right hand direction is the carboxy-terminal direction, in accordance with standard usage and convention.

[0092] By “homology” or “homologous” when referring to a polypeptide of the present invention it is meant polypeptides from different organisms with a similar sequence to the encoded amino acid sequence of a HSP and a similar biological activity or function. Although two polypeptides are said to be “homologous,” this does not imply that there is necessarily an evolutionary relationship between the polypeptides. Instead, the term “homologous” is defined to mean that the two polypeptides have similar amino acid sequences and similar biological activities or functions. In a preferred embodiment, a homologous polypeptide is one that exhibits 50% sequence similarity to HSP, preferred is 60% sequence similarity, more preferred is 70% sequence similarity. Even more preferred are homologous polypeptides that exhibit 80%, 85% or 90% sequence similarity to a HSP. In a yet more preferred embodiment, a homologous polypeptide exhibits 95%, 97%, 98% or 99% sequence similarity.

[0093] When “sequence similarity” is used in reference to polypeptides, it is recognized that residue positions that are not identical often differ by conservative amino acid substitutions. In a preferred embodiment, a polypeptide that has “sequence similarity” comprises conservative or moderately conservative amino acid substitutions. A “conservative amino acid substitution” is one in which an amino acid residue is substituted by another amino acid residue having a side chain (R group) with similar chemical properties (e.g., charge or hydrophobicity). In general, a conservative amino acid substitution will not substantially change the functional properties of a protein. In cases where two or more amino acid sequences differ from each other by conservative substitutions, the percent sequence identity or degree of similarity may be adjusted upwards to correct for the conservative nature of the substitution. Means for making this adjustment are well known to those of skill in the art. See, e.g., Pearson, Methods Mol. Biol. 24: 307-31(1994).

[0094] For instance, the following six groups each contain amino acids that are conservative substitutions for one another:
[0095] 1) Serine (S), Threonine (T);
[0096] 2) Aspartic Acid (D), Glutamic Acid (E);
[0097] 3) Asparagine (N), Glutamine (Q);
[0098] 4) Arginine (R), Lysine (K);
[0099] 5) Isoleucine (I), Leucine (L), Methionine (M), Alanine (A), Valine (V), and
[0100] 6) Phenylalanine (F), Tyrosine (Y), Tryptophan (W).

[0101] Alternatively, a conservative replacement is any change having a positive value in the PAM250 log-likelihood matrix disclosed in Gonnet et al., Science 256: 1443-45 (1992). A “moderately conservative” replacement is any change having a nonnegative value in the PAM250 log-likelihood matrix.

[0102] Sequence similarity for polypeptides, which is also referred to as sequence identity, is typically measured using sequence analysis software. Protein analysis software matches similar sequences using measures of similarity assigned to various substitutions, deletions and other modifications, including conservative amino acid substitutions. For instance, GCG contains programs such as “Gap” and “Bestfit” which can be used with default parameters to determine sequence homology or sequence identity between closely related polypeptides, such as homologous polypeptides from different species of organisms or between a wild type protein and a mutein thereof. See, e.g., GCG Version 6.1. Other programs include FASTA, discussed supra.

[0103] A preferred algorithm when comparing a sequence of the invention to a database containing a large number of sequences from different organisms is the computer program BLAST, especially blastp or tblastn. See, e.g., Altschul et al., J. Mol. Biol. 215: 403-410 (1990); Altschul et al., Nucleic Acids Res. 25:3389-402 (1997). Preferred parameters for blastp are:

| | |
|---|---|
| Expectation value: | 10 (default) |
| Filter: | seg (default) |
| Cost to open a gap: | 11 (default) |
| Cost to extend a gap: | 1 (default |
| Max. alignments: | 100 (default) |
| Word size: | 11 (default) |
| No. of descriptions: | 100 (default) |
| Penalty Matrix: | BLOSUM62 |

[0104] The length of polypeptide sequences compared for homology will generally be at least about 16 amino acid residues, usually at least about 20 residues, more usually at least about 24 residues, typically at least about 28 residues, and preferably more than about 35 residues. When searching a database containing sequences from a large number of different organisms, it is preferable to compare amino acid sequences.

[0105] Algorithms other than blastp for database searching using amino acid sequences are known in the art. For instance, polypeptide sequences can be compared using FASTA, a program in GCG Version 6.1. FASTA (e.g., FASTA2 and FASTA3) provides alignments and percent sequence identity of the regions of the best overlap between the query and search sequences (Pearson (1990), supra; Pearson (2000), supra. For example, percent sequence identity between amino acid sequences can be determined using FASTA with its default or recommended parameters (a word size of 2 and the PAM250 scoring matrix), as provided in GCG Version 6.1.

[0106] An “antibody” refers to an intact immunoglobulin, or to an antigen-binding portion thereof that competes with the intact antibody for specific binding to a molecular species, e.g., a polypeptide of the instant invention. Antigen-binding portions may be produced by recombinant DNA techniques or by enzymatic or chemical cleavage of intact antibodies. Antigen-binding portions include, inter alia, Fab, Fab′, F(ab′)₂, Fv, dAb, and complementarity determining region (CDR) fragments, single-chain antibodies (scFv), chimeric antibodies, diabodies and polypeptides that contain at least a portion of an immunoglobulin that is sufficient to confer specific antigen binding to the polypeptide. A Fab fragment is a monovalent fragment consisting of the VL, VH, CL and CH1 domains; a F(ab′)₂ fragment is a bivalent fragment comprising two Fab fragments linked by a disulfide bridge at the hinge region; a Fd fragment consists of the VH and CH1 domains; a Fv fragment consists of the VL and VH domains of a single arm of an antibody; and a dAb fragment consists of a VH domain. See, e.g., Ward et al., Nature 341: 544-546 (1989).

[0107] By “bind specifically” and “specific binding” as used herein it is meant the ability of the antibody to bind to a first molecular species in preference to binding to other molecular species with which the antibody and first molecular species are admixed. An antibody is said specifically to “recognize” a first molecular species when it can bind specifically to that first molecular species.

[0108] A single-chain antibody (scFv) is an antibody in which VL and VH regions are paired to form a monovalent molecule via a synthetic linker that enables them to be made as a single protein chain. See, e.g., Bird et al., Science 242: 423-426 (1988); Huston et al., Proc. Natl. Acad. Sci. USA 85: 5879-5883 (1988). Diabodies are bivalent, bispecific antibodies in which VH and VL domains are expressed on a single polypeptide chain, but using a linker that is too short to allow for pairing between the two domains on the same chain, thereby forcing the domains to pair with complementary domains of another chain and creating two antigen binding sites. See e.g., Holliger et al., Proc. Natl. Acad. Sci. USA 90: 6444-6448 (1993); Poljak et al., Structure 2: 1121-1123 (1994). One or more CDRs may be incorporated into a molecule either covalently or noncovalently to make it an immunoadhesin. An immunoadhesin may incorporate the CDR(s) as part of a larger polypeptide chain, may covalently link the CDR(s) to another polypeptide chain, or may incorporate the CDR(s) noncovalently. The CDRs permit the immunoadhesin to specifically bind to a particular antigen of interest. A chimeric antibody is an antibody that contains one or more regions from one antibody and one or more regions from one or more other antibodies.

[0109] An antibody may have one or more binding sites. If there is more than one binding site, the binding sites may be identical to one another or may be different. For instance, a naturally occurring immunoglobulin has two identical binding sites, a single-chain antibody or Fab fragment has one binding site, while a “bispecific” or “bifunctional” antibody has two different binding sites.

[0110] An “isolated antibody” is an antibody that (1) is not associated with naturally-associated components, including other naturally-associated antibodies, that accompany it in its native state, (2) is free of other proteins from the same species, (3) is expressed by a cell from a different species, or (4) does not occur in nature. It is known that purified proteins, including purified antibodies, may be stabilized with non-naturally-associated components. The non-naturally-associated component may be a protein, such as albumin (e.g., BSA) or a chemical such as polyethylene glycol (PEG).

[0111] A “neutralizing antibody” or “an inhibitory antibody” is an antibody that inhibits the activity of a polypeptide or blocks the binding of a polypeptide to a ligand that normally binds to it. An “activating antibody” is an antibody that increases the activity of a polypeptide.

[0112] The term “epitope” includes any protein determinant capable of specific binding to an immunoglobulin or T-cell receptor. Epitopic determinants usually consist of chemically active surface groupings of molecules such as amino acids or sugar side chains and usually have specific three-dimensional structural characteristics, as well as specific charge characteristics. An antibody is said to specifically bind an antigen when the dissociation constant is less than 1 μM, preferably less than 100 nM and most preferably less than 10 nM.

[0113] The term “patient” includes human and veterinary subjects.

[0114] Throughout this specification and claims, the word “comprise,” or variations such as “comprises” or “comprising,” will be understood to imply the inclusion of a stated integer or group of integers but not the exclusion of any other integer or group of integers.

[0115] The term “hepatic specific” refers to a nucleic acid molecule or polypeptide that is expressed predominantly in the hepatic as compared to other tissues in the body. In a preferred embodiment, a “hepatic specific” nucleic acid molecule or polypeptide is detected at a level that is 1.5-fold higher than any other tissue in the body. In a more preferred embodiment, the “hepatic specific” nucleic acid molecule or polypeptide is detected at a level that is 2-fold higher than any other tissue in the body, more preferably 5-fold higher, still more preferably at least 10-fold, 15-fold, 20-fold, 25-fold, 50-fold or 100-fold higher than any other tissue in the body. Nucleic acid molecule levels may be measured by nucleic acid hybridization, such as Northern blot hybridization, or quantitative PCR. Polypeptide levels may be measured by any method known to accurately quantitate protein levels, such as Western blot analysis.

Nucleic Acid Molecules, Regulatory Sequences, Vectors, Host Cells and Recombinant Methods of Making Polypeptides

[0116] Nucleic Acid Molecules

[0117] One aspect of the invention provides isolated nucleic acid molecules that are specific to the hepatic or to hepatic cells or tissue or that are derived from such nucleic acid molecules. These isolated hepatic specific nucleic acids (HSNAs) may comprise cDNA genomic DNA, RNA, or a combination thereof, a fragment of one of these nucleic acids, or may be a non-naturally occurring nucleic acid molecule. A HSNA may be derived from an animal. In a preferred embodiment, the HSNA is derived from a human or other mammal. In a more preferred embodiment, the HSNA is derived from a human or other primate. In an even more preferred embodiment, the HSNA is derived from a human.

[0118] In a preferred embodiment, the nucleic acid molecule encodes a polypeptide that is specific to hepatic, a hepatic-specific polypeptide (HSP). In a more preferred embodiment, the nucleic acid molecule encodes a polypeptide that comprises an amino acid sequence of SEQ ID NO: 410-611. In another highly preferred embodiment, the nucleic acid molecule comprises a nucleic acid sequence of SEQ ID NO: 1-409. Nucleotide sequences of the instantly-described nucleic acid molecules were determined by assembling several DNA molecules from either public or proprietary databases. Some of the underlying DNA sequences are the result, directly or indirectly, of at least one enzymatic polymerization reaction (e.g., reverse transcription and/or polymerase chain reaction) using an automated sequencer (such as the MegaBACE™ 1000, Amersham Biosciences, Sunnyvale, Calif., USA).

[0119] Nucleic acid molecules of the present invention may also comprise sequences that selectively hybridizes to a nucleic acid molecule encoding a HSNA or a complement or antisense thereof. The hybridizing nucleic acid molecule may or may not encode a polypeptide or may or may not encode a HSP. However, in a preferred embodiment, the hybridizing nucleic acid molecule encodes a HSP. In a more preferred embodiment, the invention provides a nucleic acid molecule that selectively hybridizes to a nucleic acid molecule or the antisense sequence of a nucleic acid molecule that encodes a polypeptide comprising an amino acid sequence of SEQ ID NO: 410-611. In an even more preferred embodiment, the invention provides a nucleic acid molecule that selectively hybridizes to a nucleic acid molecule comprising the nucleic acid sequence of SEQ ID NO: 1-409 or the antisense sequence thereof. Preferably, the nucleic acid molecule selectively hybridizes to a nucleic acid molecule or the antisense sequence of a nucleic acid molecule encoding a HSP under low stringency conditions. More preferably, the nucleic acid molecule selectively hybridizes to a nucleic acid molecule or the antisense sequence of a nucleic acid molecule encoding a HSP under moderate stringency conditions. Most preferably, the nucleic acid molecule selectively hybridizes to a nucleic acid molecule or the antisense sequence of a nucleic acid molecule encoding a HSP under high stringency conditions. In a preferred embodiment, the nucleic acid molecule hybridizes under low, moderate or high stringency conditions to a nucleic acid molecule or the antisense sequence of a nucleic acid molecule encoding a polypeptide comprising an amino acid sequence of SEQ ID NO: 410-611. In a more preferred embodiment, the nucleic acid molecule hybridizes under low, moderate or high stringency conditions to a nucleic acid molecule or the antisense sequence of a nucleic acid molecule comprising a nucleic acid sequence selected from SEQ ID NO: 1-409.

[0120] Nucleic acid molecules of the present invention may also comprise nucleic acid sequences that exhibit substantial sequence similarity to a nucleic acid encoding a HSP or a complement of the encoding nucleic acid molecule. In this embodiment, it is preferred that the nucleic acid molecule exhibit substantial sequence similarity to a nucleic acid molecule encoding human HSP. More preferred is a nucleic acid molecule exhibiting substantial sequence similarity to a nucleic acid molecule encoding a polypeptide having an amino acid sequence of SEQ ID NO: 410-611. By substantial sequence similarity it is meant a nucleic acid molecule having at least 60% sequence identity with a nucleic acid molecule encoding a HSP, such as a polypeptide having an amino acid sequence of SEQ ID NO: 410-611, more preferably at least 70%, even more preferably at least 80% and even more preferably at least 85%. In a more preferred embodiment, the similar nucleic acid molecule is one that has at least 90% sequence identity with a nucleic acid molecule encoding a HSP, more preferably at least 95%, more preferably at least 97%, even more preferably at least 98%, and still more preferably at least 99%. Most preferred in this embodiment is a nucleic acid molecule that has at least 99.5%, 99.6%, 99.7%, 99.8% or 99.9% sequence identity with a nucleic acid molecule encoding a HSP.

[0121] The nucleic acid molecules of the present invention are also inclusive of those exhibiting substantial sequence similarity to a HSNA or its complement. In this embodiment, it is preferred that the nucleic acid molecule exhibit substantial sequence similarity to a nucleic acid molecule having a nucleic acid sequence of SEQ ID NO: 1-409. By substantial sequence similarity it is meant a nucleic acid molecule that has at least 60% sequence identity with a HSNA, such as one having a nucleic acid sequence of SEQ ID NO: 1-409, more preferably at least 70%, even more preferably at least 80% and even more preferably at least 85%. More preferred is a nucleic acid molecule that has at least 90% sequence identity with a HSNA, more preferably at least 95%, more preferably at least 97%, even more preferably at least 98%, and still more preferably at least 99%. Most preferred is a nucleic acid molecule that has at least 99.5%, 99.6%, 99.7%, 99.8% or 99.9% sequence identity with a HSNA.

[0122] Nucleic acid molecules that exhibit substantial sequence similarity are inclusive of sequences that exhibit sequence identity over their entire length to a HSNA or to a nucleic acid molecule encoding a HSP, as well as sequences that are similar over only a part of its length. In this case, the part is at least 50 nucleotides of the HSNA or the nucleic acid molecule encoding a HSP, preferably at least 100 nucleotides, more preferably at least 150 or 200 nucleotides, even more preferably at least 250 or 300 nucleotides, still more preferably at least 400 or 500 nucleotides.

[0123] The substantially similar nucleic acid molecule may be a naturally occurring one that is derived from another species, especially one derived from another primate, wherein the similar nucleic acid molecule encodes an amino acid sequence that exhibits significant sequence identity to that of SEQ ID NO: 410-611 or demonstrates significant sequence identity to the nucleotide sequence of SEQ ID NO: 1-409. The similar nucleic acid molecule may also be a naturally occurring nucleic acid molecule from a human, when the HSNA is a member of a gene family. The similar nucleic acid molecule may also be a naturally occurring nucleic acid molecule derived from a non-primate, mammalian species, including without limitation, domesticated species, e.g., dog, cat, mouse, rat, rabbit, hamster, cow, horse and pig; and wild animals, e.g., monkey, fox, lions, tigers, bears, giraffes, zebras, etc. The substantially similar nucleic acid molecule may also be a naturally occurring nucleic acid molecule derived from a non-mammalian species, such as birds or reptiles. The naturally occurring substantially similar nucleic acid molecule may be isolated directly from humans or other species. In another embodiment, the substantially similar nucleic acid molecule may be one that is experimentally produced by random mutation of a nucleic acid molecule. In another embodiment, the substantially similar nucleic acid molecule may be one that is experimentally produced by directed mutation of a HSNA. In a preferred embodiment, the substantially similar nucleic acid molecule is an HSNA.

[0124] The nucleic acid molecules of the present invention are also inclusive of allelic variants of a HSNA or a nucleic acid encoding a HSP. For example, single nucleotide polymorphisms (SNPs) occur frequently in eukaryotic genomes and the sequence determined from one individual of a species may differ from other allelic forms present within the population. More than 1.4 million SNPs have already identified in the human genome, International Human Genome Sequencing Consortium, Nature 409: 860-921 (2001)—Variants with small deletions and insertions of more than a single nucleotide are also found in the general population, and often do not alter the function of the protein. In addition, amino acid substitutions occur frequently among natural allelic variants, and often do not substantially change protein function.

[0125] In a preferred embodiment, the allelic variant is a variant of a gene, wherein the gene is transcribed into an mRNA that encodes a HSP. In a more preferred embodiment, the gene is transcribed into an mRNA that encodes a HSP comprising an amino acid sequence of SEQ ID NO: 410-611. In another preferred embodiment, the allelic variant is a variant of a gene, wherein the gene is transcribed into an mRNA that is a HSNA. In a more preferred embodiment, the gene is transcribed into an mRNA that comprises the nucleic acid sequence of SEQ ID NO: 1-409. Also preferred is that the allelic variant is a naturally occurring allelic variant in the species of interest, particularly human.

[0126] Nucleic acid molecules of the present invention are also inclusive of nucleic acid sequences comprising a part of a nucleic acid sequence of the instant invention. The part may or may not encode a polypeptide, and may or may not encode a polypeptide that is a HSP. In a preferred embodiment, the part encodes a HSP. In one embodiment, the nucleic acid molecule comprises a part of a HSNA. In another embodiment, the nucleic acid molecule comprises a part of a nucleic acid molecule that hybridizes or exhibits substantial sequence similarity to a HSNA. In another embodiment, the nucleic acid molecule comprises a part of a nucleic acid molecule that is an allelic variant of a HSNA. In yet another embodiment, the nucleic acid molecule comprises a part of a nucleic acid molecule that encodes a HSP. A part comprises at least 10 nucleotides, more preferably at least 15, 17, 18, 20, 25, 30, 35, 40, 50, 60, 70, 80, 90, 100, 150, 200, 250, 300, 350, 400 or 500 nucleotides. The maximum size of a nucleic acid part is one nucleotide shorter than the sequence of the nucleic acid molecule encoding the full-length protein.

[0127] Nucleic acid molecules of the present invention are also inclusive of nucleic acid sequences that encode fusion proteins, homologous proteins, polypeptide fragments, muteins and polypeptide analogs, as described infra.

[0128] Nucleic acid molecules of the present invention are also inclusive of nucleic acid sequences containing modifications of the native nucleic acid molecule. Examples of such modifications include, but are not limited to, normative internucleoside bonds, post-synthetic modifications or altered nucleotide analogues. One having ordinary skill in the art would recognize that the type of modification that may be made will depend upon the intended use of the nucleic acid molecule. For instance, when the nucleic acid molecule is used as a hybridization probe, the range of such modifications will be limited to those that permit sequence-discriminating base pairing of the resulting nucleic acid. When used to direct expression of RNA or protein in vitro or in vivo, the range of such modifications will be limited to those that permit the nucleic acid to function properly as a polymerization substrate. When the isolated nucleic acid is used as a therapeutic agent, the modifications will be limited to those that do not confer toxicity upon the isolated nucleic acid.

[0129] Accordingly, in one embodiment, a nucleic acid molecule may include nucleotide analogues that incorporate labels that are directly detectable, such as radiolabels or fluorophores, or nucleotide analogues that incorporate labels that can be visualized in a subsequent reaction, such as biotin or various haptens. The labeled nucleic acid molecules are particularly useful as hybridization probes.

[0130] Common radiolabeled analogues include those labeled with ³³P, ³²P, and ³⁵S, such as α-³²P-dATP, α-³²P-dCTP, α-³²P-dGTP, α-³²P-dTTP, α-³²P-ATP, α-³²P-CTP, α-³²P-GTP, α-³²P-UTP, α³⁵S-dATP, γ-³⁵S-GTP, γ-³³P-dATP, and the like.

[0131] Commercially available fluorescent nucleotide analogues readily incorporated into the nucleic acids of the present invention include Cy3-dCTP, Cy3-dUTP, Cy5-dCTP, Cy3-dUTP (Amersham Biosciences, Piscataway, N.J., USA), fluorescein-12-dUTP, tetramethylrhodamine-6-dUTP, Texas Red®-5-dUTP, Cascade Blue®-7-dUTP, BODIPY® FL-14-dUTP, BODIPY® TMR-14-dUTP, BODIPY® TR-14-dUTP, Rhodamine Green™-5-dUTP, Oregon Green® 488-5-dUTP, Texas Red®-12-dUTP, BODIPY® 630/650-14-dUTP, BODIPY® 650/665-14-dUTP, Alexa Fluor® 488-5-dUTP, Alexa Fluor® 532-5-dUTP, Alexa Fluor® 568-5-dUTP, Alexa Fluor® 594-5-dUTP, Alexa Fluor® 546-14-dUTP, fluorescein-12-UTP, tetramethylrhodamine-6-UTP, Texas Red®-5-UTP, Cascade Blue®-7-UTP, BODIPY® FL-14-UTP, BODIPY® TMR-14-UTP, BODIPY® TR-14-UTP, Rhodamine Green™-5-UTP, Alexa Fluor® 488-5-UTP, Alexa Fluor® 546-14-UTP (Molecular Probes, Inc. Eugene, Oreg., USA). One may also custom synthesize nucleotides having other fluorophores. See Henegariu et al., Nature Biotechnol. 18: 345-348 (2000).

[0132] Haptens that are commonly conjugated to nucleotides for subsequent labeling include biotin (biotin-11-dUTP, Molecular Probes, Inc., Eugene, Oreg., USA; biotin-21-UTP, biotin-21-dUTP, Clontech Laboratories, Inc., Palo Alto, Calif., USA), digoxigenin (DIG-11-dUTP, alkali labile, DIG-11-UTP, Roche Diagnostics Corp., Indianapolis, Ind., USA), and dinitrophenyl (dinitrophenyl-11-dUTP, Molecular Probes, Inc., Eugene, Oreg., USA).

[0133] Nucleic acid molecules of the present invention can be labeled by incorporation of labeled nucleotide analogues into the nucleic acid. Such analogues can be incorporated by enzymatic polymerization, such as by nick translation, random priming, polymerase chain reaction (PCR), terminal transferase tailing, and end-filling of overhangs, for DNA molecules, and in vitro transcription driven, e.g., from phage promoters, such as T7, T3, and SP6, for RNA molecules. Commercial kits are readily available for each such labeling approach. Analogues can also be incorporated during automated solid phase chemical synthesis. Labels can also be incorporated after nucleic acid synthesis, with the 5′ phosphate and 3′ hydroxyl providing convenient sites for post-synthetic covalent attachment of detectable labels.

[0134] Other post-synthetic approaches also permit internal labeling of nucleic acids. For example, fluorophores can be attached using a cisplatin reagent that reacts with the N7 of guanine residues (and, to a lesser extent, adenine bases) in DNA, RNA, and Peptide Nucleic Acids (PNA) to provide a stable coordination complex between the nucleic acid and fluorophore label (Universal Linkage System) (available from Molecular Probes, Inc., Eugene, Oreg., USA and Amersham Pharmacia Biotech, Piscataway, N.J., USA); see Alers et al., Genes, Chromosomes & Cancer 25: 301-305 (1999); Jelsma et al., J. NIH Res. 5: 82 (1994); Van Belkum et al., BioTechniques 16: 148-153 (1994). Alternatively, nucleic acids can be labeled using a disulfide-containing linker (FastTag™ Reagent, Vector Laboratories, Inc., Burlingame, Calif., USA) that is photo- or thermally coupled to the target nucleic acid using aryl azide chemistry; after reduction, a free thiol is available for coupling to a hapten, fluorophore, sugar, affinity ligand, or other marker.

[0135] One or more independent or interacting labels can be incorporated into the nucleic acid molecules of the present invention. For example, both a fluorophore and a moiety that in proximity thereto acts to quench fluorescence can be included to report specific hybridization through release of fluorescence quenching or to report exonucleotidic excision. See, e.g., Tyagi et al., Nature Biotechnol. 14: 303-308 (1996); Tyagi et al., Nature Biotechnol. 16: 49-53 (1998); Sokol et al., Proc. Natl. Acad. Sci. USA 95: 11538-11543 (1998); Kostrikis et al., Science 279: 1228-1229 (1998); Marras et al., Genet. Anal. 14: 151-156 (1999); Holland et al., Proc. Natl. Acad. Sci. USA 88: 7276-7280 (1991); Heid et al., Genome Res. 6(10): 986-94 (1996); Kuimelis et al., Nucleic Acids Symp. Ser. (37): 255-6 (1997); and U.S. Pat. Nos. 5,846,726, 5,925,517, 5,925,517, 5,723,591 and 5,538,848, the disclosures of which are incorporated herein by reference in their entireties.

[0136] Nucleic acid molecules of the present invention may also be modified by altering one or more native phosphodiester internucleoside bonds to more nuclease-resistant, internucleoside bonds. See Hartmann et al. (eds.), Manual of Antisense Methodology: Perspectives in Antisense Science, Kluwer Law International (1999); Stein et al. (eds.), Applied Antisense Oligonucleotide Technology, Wiley-Liss (1998); Chadwick et al. (eds.), Oligonucleotides as Therapeutic Agents—Symposium No. 209, John Wiley & Son Ltd (1997). Such altered internucleoside bonds are often desired for techniques or for targeted gene correction, Gamper et al., Nucl. Acids Res. 28(21): 4332-4339 (2000). For double stranded RNA inhibition which may utilize either natural ds RNA or ds RNA modified in its, sugar, phosphate or base, see Hannon, Nature 418(11): 244-251 (2002); Fire et al. in WO 99/32619; Tuschl et al. in US2002/0086356; Kruetzer et al. in WO 00/44895, the disclosures of which are incorporated herein by reference in their entirety. For circular antisense, see Kool in U.S. Pat. No. 5,426,180, the disclosure of which is incorporated herein by reference in its entirety.

[0137] Modified oligonucleotide backbones include, without limitation, phosphorothioates, chiral phosphorothioates, phosphorodithioates, phosphotriesters, aminoalkylphosphotriesters, methyl and other alkyl phosphonates including 3′-alkylene phosphonates and chiral phosphonates, phosphinates, phosphoramidates including 3′-amino phosphoramidate and aminoalkylphosphoramidates, thionophosphoramidates, thionoalkylphosphonates, thionoalkylphosphotriesters, and boranophosphates having normal 3′-5′ linkages, 2′-5′ linked analogs of these, and those having inverted polarity wherein the adjacent pairs of nucleoside units are linked 3′-5′ to 5′-3′ or 2′-5′ to 5′-2′. Representative U.S. patents that teach the preparation of the above phosphorus-containing linkages include, but are not limited to, U.S. Pat. Nos. 3,687,808; 4,469,863; 4,476,301; 5,023,243; 5,177,196; 5,188,897; 5,264,423; 5,276,019; 5,278,302; 5,286,717; 5,321,131; 5,399,676; 5,405,939; 5,453,496; 5,455,233; 5,466,677; 5,476,925; 5,519,126; 5,536,821; 5,541,306; 5,550,111; 5,563,253; 5,571,799; 5,587,361; and 5,625,050, the disclosures of which are incorporated herein by reference in their entireties. In a preferred embodiment, the modified internucleoside linkages may be used for antisense techniques.

[0138] Other modified oligonucleotide backbones do not include a phosphorus atom, but have backbones that are formed by short chain alkyl or cycloalkyl internucleoside linkages, mixed heteroatom and alkyl or cycloalkyl internucleoside linkages, or one or more short chain heteroatomic or heterocyclic internucleoside linkages. These include those having morpholino linkages (formed in part from the sugar portion of a nucleoside); siloxane backbones; sulfide, sulfoxide and sulfone backbones; formacetyl and thioformacetyl backbones; methylene formacetyl and thioformacetyl backbones; alkene containing backbones; sulfamate backbones; methyleneimino and methylenehydrazino backbones; sulfonate and sulfonamide backbones; amide backbones; and others having mixed N, O, S and CH₂ component parts. Representative U.S. patents that teach the preparation of the above backbones include, but are not limited to, U.S. Pat. Nos. 5,034,506; 5,166,315; 5,185,444; 5,214,134; 5,216,141; 5,235,033; 5,264,562; 5,264,564; 5,405,938; 5,434,257; 5,466,677; 5,470,967; 5,489,677; 5,541,307; 5,561,225; 5,596,086; 5,602,240; 5,610,289; 5,602,240; 5,608,046; 5,610,289; 5,618,704; 5,623,070; 5,663,312; 5,633,360; 5,677,437 and 5,677,439; the disclosures of which are incorporated herein by reference in their entireties.

[0139] In other preferred nucleic acid molecules, both the sugar and the internucleoside linkage are replaced with novel groups, such as peptide nucleic acids (PNA). In PNA compounds, the phosphodiester backbone of the nucleic acid is replaced with an amide-containing backbone, in particular by repeating N-(2-aminoethyl)glycine units linked by amide bonds. Nucleobases are bound directly or indirectly to aza nitrogen atoms of the amide portion of the backbone, typically by methylene carbonyl linkages. PNA can be synthesized using a modified peptide synthesis protocol. PNA oligomers can be synthesized by both Fmoc and tBoc methods. Representative U.S. patents that teach the preparation of PNA compounds include, but are not limited to, U.S. Pat. Nos. 5,539,082; 5,714,331; and 5,719,262, each of which is herein incorporated by reference in its entirety. Automated PNA synthesis is readily achievable on commercial synthesizers (see, e.g., “PNA User's Guide,” Rev. 2, February 1998, Perseptive Biosystems Part No. 60138, Applied Biosystems, Inc., Foster City, Calif.). PNA molecules are advantageous for a number of reasons. First, because the PNA backbone is uncharged, PNA/DNA and PNA/RNA duplexes have a higher thermal stability than is found in DNA/DNA and DNA/RNA duplexes. The Tm of a PNA/DNA or PNA/RNA duplex is generally 1° C. higher per base pair than the Tm of the corresponding DNA/DNA or DNA/RNA duplex (in 100 mM NaCl). Second, PNA molecules can also form stable PNA/DNA complexes at low ionic strength, under conditions in which DNA/DNA duplex formation does not occur. Third, PNA also demonstrates greater specificity in binding to complementary DNA because a PNA/DNA mismatch is more destabilizing than DNA/DNA mismatch. A single mismatch in mixed a PNA/DNA 15-mer lowers the Tm by 8-20° C. (15° C. on average). In the corresponding DNA/DNA duplexes, a single mismatch lowers the Tm by 4-16° C. (11° C. on average). Because PNA probes can be significantly shorter than DNA probes, their specificity is greater. Fourth, PNA oligomers are resistant to degradation by enzymes, and the lifetime of these compounds is extended both in vivo and in vitro because nucleases and proteases do not recognize the PNA polyamide backbone with nucleobase sidechains. See, e.g., Ray et al., FASEB J. 14(9): 1041-60 (2000); Nielsen et al., Pharmacol Toxicol. 86(1): 3-7 (2000); Larsen et al., Biochim Biophys Acta. 1489(1): 159-66 (1999); Nielsen, Curr. Opin. Struct. Biol. 9(3): 353-7 (1999), and Nielsen, Curr. Opin. Biotechnol. 10(1): 71-5 (1999).

[0140] Nucleic acid molecules may be modified compared to their native structure throughout the length of the nucleic acid molecule or can be localized to discrete portions thereof. As an example of the latter, chimeric nucleic acids can be synthesized that have discrete DNA and RNA domains and that can be used for targeted gene repair and modified PCR reactions, as further described in, Misra et al., Biochem. 37: 1917-1925 (1998); and Finn et al., Nucl. Acids Res. 24: 3357-3363 (1996), and U.S. Pat. Nos. 5,760,012 and 5,731,181, the disclosures of which are incorporated herein by reference in their entireties.

[0141] Unless otherwise specified, nucleic acid molecules of the present invention can include any topological conformation appropriate to the desired use; the term thus explicitly comprehends, among others, single-stranded, double-stranded, triplexed, quadruplexed, partially double-stranded, partially-triplexed, partially-quadruplexed, branched, hairpinned, circular, and padlocked conformations. Padlock conformations and their utilities are further described in Banér et al., Curr. Opin. Biotechnol 12: 11-15 (2001); Escude et al., Proc. Natl. Acad. Sci. USA 14: 96(19): 10603-7 (1999); and Nilsson et al., Science 265(5181): 2085-8 (1994). Triplex and quadruplex conformations, and their utilities, are reviewed in Praseuth et al., Biochim. Biophys. Acta. 1489(1): 181-206 (1999); Fox, Curr. Med. Chem. 7(1): 17-37 (2000); Kochetkova et al., Methods Mol. Biol. 130: 189-201 (2000); Chan et al., J. Mol. Med. 75(4): 267-82 (1997); Rowley et al., Mol Med 5(10): 693-700 (1999); Kool, Annu Rev Biophys Biomol Struct. 25: 1-28 (1996).

[0142] Methods for Using Nucleic Acid Molecules as Probes and Primers

[0143] The isolated nucleic acid molecules of the present invention can be used as hybridization probes to detect, characterize, and quantify hybridizing nucleic acids in, and isolate hybridizing nucleic acids from, both genomic and transcript-derived nucleic acid samples. When free in solution, such probes are typically, but not invariably, detectably labeled; bound to a substrate, as in a microarray, such probes are typically, but not invariably unlabeled.

[0144] In one embodiment, the isolated nucleic acid molecules of the present invention can be used as probes to detect and characterize gross alterations in the gene of a HSNA, such as deletions, insertions, translocations, and duplications of the HSNA genomic locus through fluorescence in situ hybridization (FISH) to chromosome spreads. See, e.g., Andreeff et al. (eds.), Introduction to Fluorescence In Situ Hybridization: Principles and Clinical Applications, John Wiley & Sons (1999). The isolated nucleic acid molecules of the present invention can be used as probes to assess smaller genomic alterations using, e.g., Southern blot detection of restriction fragment length polymorphisms. The isolated nucleic acid molecules of the present invention can be used as probes to isolate genomic clones that include a nucleic acid molecule of the present invention, which thereafter can be restriction mapped and sequenced to identify deletions, insertions, translocations, and substitutions (single nucleotide polymorphisms, SNPs) at the sequence level. Alternatively, detection techniques such as molecular beacons may be used, see Kostrikis et al. Science 279: 1228-1229 (1998).

[0145] The isolated nucleic acid molecules of the present invention can be also be used as probes to detect, characterize, and quantify HSNA in, and isolate HSNA from, transcript-derived nucleic acid samples. In one embodiment, the isolated nucleic acid molecules of the present invention can be used as hybridization probes to detect, characterize by length, and quantify mRNA by Northern blot of total or poly-A⁺-selected RNA samples. In another embodiment, the isolated nucleic acid molecules of the present invention can be used as hybridization probes to detect, characterize by location, and quantify mRNA by in situ hybridization to tissue sections. See, e.g., Schwarchzacher et al., In Situ Hybridization, Springer-Verlag New York (2000). In another preferred embodiment, the isolated nucleic acid molecules of the present invention can be used as hybridization probes to measure the representation of clones in a cDNA library or to isolate hybridizing nucleic acid molecules acids from cDNA libraries, permitting sequence level characterization of mRNAs that hybridize to HSNAs, including, without limitations, identification of deletions, insertions, substitutions, truncations, alternatively spliced forms and single nucleotide polymorphisms. In yet another preferred embodiment, the nucleic acid molecules of the instant invention may be used in microarrays.

[0146] All of the aforementioned probe techniques are well within the skill in the art, and are described at greater length in standard texts such as Sambrook (2001), supra; Ausubel (1999), supra; and Walker et al. (eds.), The Nucleic Acids Protocols Handbook, Humana Press (2000).

[0147] In another embodiment, a nucleic acid molecule of the invention may be used as a probe or primer to identify and/or amplify a second nucleic acid molecule that selectively hybridizes to the nucleic acid molecule of the invention. In this embodiment, it is preferred that the probe or primer be derived from a nucleic acid molecule encoding a HSP. More preferably, the probe or primer is derived from a nucleic acid molecule encoding a polypeptide having an amino acid sequence of SEQ ID NO: 410-611. Also preferred are probes or primers derived from a HSNA. More preferred are probes or primers derived from a nucleic acid molecule having a nucleotide sequence of SEQ ID NO: 1-409.

[0148] In general, a probe or primer is at least 10 nucleotides in length, more preferably at least 12, more preferably at least 14 and even more preferably at least 16 or 17 nucleotides in length. In an even more preferred embodiment, the probe or primer is at least 18 nucleotides in length, even more preferably at least 20 nucleotides and even more preferably at least 22 nucleotides in length. Primers and probes may also be longer in length. For instance, a probe or primer may be 25 nucleotides in length, or may be 30, 40 or 50 nucleotides in length. Methods of performing nucleic acid hybridization using oligonucleotide probes are well known in the art. See, e.g., Sambrook et al., 1989, supra, Chapter 11 and pp. 11.31-11.32 and 11.40-11.44, which describes radiolabeling of short probes, and pp. 11.45-11.53, which describe hybridization conditions for oligonucleotide probes, including specific conditions for probe hybridization (pp. 11.50-11.51).

[0149] Methods of performing primer-directed amplification are also well known in the art. Methods for performing the polymerase chain reaction (PCR) are compiled, inter alia, in McPherson, PCR Basics: From Background to Bench, Springer Verlag (2000); Innis et al. (eds.), PCR Applications: Protocols for Functional Genomics, Academic Press (1999); Gelfand et al. (eds.), PCR Strategies, Academic Press (1998); Newton et al., PCR, Springer-Verlag New York (1997); Burke (ed.), PCR: Essential Techniques, John Wiley & Son Ltd (1996); White (ed.), PCR Cloning Protocols: From Molecular Cloning to Genetic Engineering, Vol. 67, Humana Press (1996); and McPherson et al. (eds.), PCR 2: A Practical Approach, Oxford University Press, Inc. (1995). Methods for performing RT-PCR are collected, e.g., in Siebert et al. (eds.), Gene Cloning and Analysis by RT-PCR, Eaton Publishing Company/Bio Techniques Books Division, 1998; and Siebert (ed.), PCR Technique: RT-PCR, Eaton Publishing Company/BioTechniques Books (1995).

[0150] PCR and hybridization methods may be used to identify and/or isolate nucleic acid molecules of the present invention including allelic variants, homologous nucleic acid molecules and fragments. PCR and hybridization methods may also be used to identify, amplify and/or isolate nucleic acid molecules of the present invention that encode homologous proteins, analogs, fusion protein or muteins of the invention. Nucleic acid primers as described herein can be used to prime amplification of nucleic acid molecules of the invention, using transcript-derived or genomic DNA as template.

[0151] These nucleic acid primers can also be used, for example, to prime single base extension (SBE) for SNP detection (See, e.g., U.S. Pat. No. 6,004,744, the disclosure of which is incorporated herein by reference in its entirety).

[0152] Isothermal amplification approaches, such as rolling circle amplification, are also now well-described. See, e.g., Schweitzer et al., Curr. Opin. Biotechnol. 12(1): 21-7 (2001); international patent publications WO 97/19193 and WO 00/15779, and U.S. Pat. Nos. 5,854,033 and 5,714,320, the disclosures of which are incorporated herein by reference in their entireties. Rolling circle amplification can be combined with other techniques to facilitate SNP detection. See, e.g., Lizardi et al., Nature Genet. 19(3): 225-32 (1998).

[0153] Nucleic acid molecules of the present invention may be bound to a substrate either covalently or noncovalently. The substrate can be porous or solid, planar or non-planar, unitary or distributed. The bound nucleic acid molecules may be used as hybridization probes, and may be labeled or unlabeled. In a preferred embodiment, the bound nucleic acid molecules are unlabeled.

[0154] In one embodiment, the nucleic acid molecule of the present invention is bound to a porous substrate, e.g., a membrane, typically comprising nitrocellulose, nylon, or positively charged derivatized nylon. The nucleic acid molecule of the present invention can be used to detect a hybridizing nucleic acid molecule that is present within a labeled nucleic acid sample, e.g., a sample of transcript-derived nucleic acids. In another embodiment, the nucleic acid molecule is bound to a solid substrate, including, without limitation, glass, amorphous silicon, crystalline silicon or plastics. Examples of plastics include, without limitation, polymethylacrylic, polyethylene, polypropylene, polyacrylate, polymethylmethacrylate, polyvinylchloride, polytetrafluoroethylene, polystyrene, polycarbonate, polyacetal, polysulfone, celluloseacetate, cellulosenitrate, nitrocellulose, or mixtures thereof. The solid substrate may be any shape, including rectangular, disk-like and spherical. In a preferred embodiment, the solid substrate is a microscope slide or slide-shaped substrate.

[0155] The nucleic acid molecule of the present invention can be attached covalently to a surface of the support substrate or applied to a derivatized surface in a chaotropic agent that facilitates denaturation and adherence by presumed noncovalent interactions, or some combination thereof. The nucleic acid molecule of the present invention can be bound to a substrate to which a plurality of other nucleic acids are concurrently bound, hybridization to each of the plurality of bound nucleic acids being separately detectable. At low density, e.g. on a porous membrane, these substrate-bound collections are typically denominated macroarrays; at higher density, typically on a solid support, such as glass, these substrate bound collections of plural nucleic acids are colloquially termed microarrays. As used herein, the term microarray includes arrays of all densities. It is, therefore, another aspect of the invention to provide microarrays that comprise one or more of the nucleic acid molecules of the present invention.

[0156] In yet another embodiment, the invention is directed to single exon probes based on the HSNAs disclosed herein.

[0157] Expression Vectors, Host Cells and Recombinant Methods of Producing Polypeptides

[0158] Another aspect of the present invention provides vectors that comprise one or more of the isolated nucleic acid molecules of the present invention, and host cells in which such vectors have been introduced.

[0159] The vectors can be used, inter alia, for propagating the nucleic acid molecules of the present invention in host cells (cloning vectors), for shuttling the nucleic acid molecules of the present invention between host cells derived from disparate organisms (shuttle vectors), for inserting the nucleic acid molecules of the present invention into host cell chromosomes (insertion vectors), for expressing sense or antisense RNA transcripts of the nucleic acid molecules of the present invention in vitro or within a host cell, and for expressing polypeptides encoded by the nucleic acid molecules of the present invention, alone or as fusion proteins with heterologous polypeptides (expression vectors). Vectors are by now well known in the art, and are described, inter alia, in Jones et al. (eds.), Vectors: Cloning Applications: Essential Techniques (Essential Techniques Series), John Wiley & Son Ltd. (1998); Jones et al. (eds.), Vectors: Expression Systems: Essential Techniques (Essential Techniques Series), John Wiley & Son Ltd. (1998); Gacesa et al., Vectors: Essential Data, John Wiley & Sons Ltd. (1995); Cid-Arregui (eds.), Viral Vectors: Basic Science and Gene Therapy, Eaton Publishing Co. (2000); Sambrook (2001), supra; Ausubel (1999), supra. Furthermore, a variety of vectors are available commercially. Use of existing vectors and modifications thereof are well within the skill in the art. Thus, only basic features need be described here.

[0160] Nucleic acid sequences may be expressed by operatively linking them to an expression control sequence in an appropriate expression vector and employing that expression vector to transform an appropriate unicellular host. Expression control sequences are sequences that control the transcription, post-transcriptional events and translation of nucleic acid sequences. Such operative linking of a nucleic sequence of this invention to an expression control sequence, of course, includes, if not already part of the nucleic acid sequence, the provision of a translation initiation codon, ATG or GTG, in the correct reading frame upstream of the nucleic acid sequence.

[0161] A wide variety of host/expression vector combinations may be employed in expressing the nucleic acid sequences of this invention. Useful expression vectors, for example, may consist of segments of chromosomal, non-chromosomal and synthetic nucleic acid sequences.

[0162] In one embodiment, prokaryotic cells may be used with an appropriate vector. Prokaryotic host cells are often used for cloning and expression. In a preferred embodiment, prokaryotic host cells include E. coli, Pseudomonas, Bacillus and Streptomyces. In a preferred embodiment, bacterial host cells are used to express the nucleic acid molecules of the instant invention. Useful expression vectors for bacterial hosts include bacterial plasmids, such as those from E. coli, Bacillus or Streptomyces, including pBluescript, pGEX-2T, pUC vectors, col E1, pCR1, pBR322, pMB9 and their derivatives, wider host range plasmids, such as RP4, phage DNAs, e.g., the numerous derivatives of phage lambda, e.g., NM989, λGT10 and λGT11, and other phages, e.g., M13 and filamentous single stranded phage DNA. Where E. coli is used as host, selectable markers are, analogously, chosen for selectivity in gram negative bacteria: e.g., typical markers confer resistance to antibiotics, such as ampicillin, tetracycline, chloramphenicol, kanamycin, streptomycin and zeocin; auxotrophic markers can also be used.

[0163] In other embodiments, eukaryotic host cells, such as yeast, insect, mammalian or plant cells, may be used. Yeast cells, typically S. cerevisiae, are useful for eukaryotic genetic studies, due to the ease of targeting genetic changes by homologous recombination and the ability to easily complement genetic defects using recombinantly expressed proteins. Yeast cells are useful for identifying interacting protein components, e.g. through use of a two-hybrid system. In a preferred embodiment, yeast cells are useful for protein expression. Vectors of the present invention for use in yeast will typically, but not invariably, contain an origin of replication suitable for use in yeast and a selectable marker that is functional in yeast. Yeast vectors include Yeast Integrating plasmids (e.g. YIp5) and Yeast Replicating plasmids (the YRp and YEp series plasmids), Yeast Centromere plasmids (the YCp series plasmids), Yeast Artificial Chromosomes (YACs) which are based on yeast linear plasmids, denoted YLp, pGPD-2, 2μ plasmids and derivatives thereof, and improved shuttle vectors such as those described in Gietz et al., Gene, 74: 527-34 (1988) (YIplac, YEplac and YCplac). Selectable markers in yeast vectors include a variety of auxotrophic markers, the most common of which are (in Saccharomyces cerevisiae) URA3, HIS3, LEU2, TRP1 and LYS2, which complement specific auxotrophic mutations, such as ura3-52, his3-D1, leu2-D1, trp1-D1 and lys2-201.

[0164] Insect cells may be chosen for high efficiency protein expression. Where the host cells are from Spodoptera frugiperda, e.g., Sf9 and Sf21 cell lines, and expresSF™ cells (Protein Sciences Corp., Meriden, Conn., USA), the vector replicative strategy is typically based upon the baculovirus life cycle. Typically, baculovirus transfer vectors are used to replace the wild-type AcMNPV polyhedrin gene with a heterologous gene of interest. Sequences that flank the polyhedrin gene in the wild-type genome are positioned 5′ and 3′ of the expression cassette on the transfer vectors. Following co-transfection with AcMNPV DNA, a homologous recombination event occurs between these sequences resulting in a recombinant virus carrying the gene of interest and the polyhedrin or p10 promoter. Selection can be based upon visual screening for lacZ fusion activity.

[0165] The host cells may also be mammalian cells, which are particularly useful for expression of proteins intended as pharmaceutical agents, and for screening of potential agonists and antagonists of a protein or a physiological pathway. Mammalian vectors intended for autonomous extrachromosomal replication will typically include a viral origin, such as the SV40 origin (for replication in cell lines expressing the large T-antigen, such as COS1 and COS7 cells), the papillomavirus origin, or the EBV origin for long term episomal replication (for use, e.g., in 293-EBNA cells, which constitutively express the EBV EBNA-1 gene product and adenovirus E1A). Vectors intended for integration, and thus replication as part of the mammalian chromosome, can, but need not, include an origin of replication functional in mammalian cells, such as the SV40 origin. Vectors based upon viruses, such as adenovirus, adeno-associated virus, vaccinia virus, and various mammalian retroviruses, will typically replicate according to the viral replicative strategy. Selectable markers for use in mammalian cells include, include but are not limited to, resistance to neomycin (G418), blasticidin, hygromycin and zeocin, and selection based upon the purine salvage pathway using HAT medium.

[0166] Expression in mammalian cells can be achieved using a variety of plasmids, including pSV2, pBC12BI, and p91023, as well as lytic virus vectors (e.g., vaccinia virus, adeno virus, and baculovirus), episomal virus vectors (e.g., bovine papillomavirus), and retroviral vectors (e.g., murine retroviruses). Useful vectors for insect cells include baculoviral vectors and pVL 941.

[0167] Plant cells can also be used for expression, with the vector replicon typically derived from a plant virus (e.g., cauliflower mosaic virus, CaMV; tobacco mosaic virus, TMV) and selectable markers chosen for suitability in plants.

[0168] It is known that codon usage of different host cells may be different. For example, a plant cell and a human cell may exhibit a difference in codon preference for encoding a particular amino acid. As a result, human mRNA may not be efficiently translated in a plant, bacteria or insect host cell. Therefore, another embodiment of this invention is directed to codon optimization. The codons of the nucleic acid molecules of the invention may be modified to resemble, as much as possible, genes naturally contained within the host cell without altering the amino acid sequence encoded by the nucleic acid molecule.

[0169] Any of a wide variety of expression control sequences may be used in these vectors to express the nucleic acid molecules of this invention. Such useful expression control sequences include the expression control sequences associated with structural genes of the foregoing expression vectors. Expression control sequences that control transcription include, e.g., promoters, enhancers and transcription termination sites. Expression control sequences in eukaryotic cells that control post-transcriptional events include splice donor and acceptor sites and sequences that modify the half-life of the transcribed RNA, e.g., sequences that direct poly(A) addition or binding sites for RNA-binding proteins. Expression control sequences that control translation include ribosome binding sites, sequences which direct targeted expression of the polypeptide to or within particular cellular compartments, and sequences in the 5′ and 3′ untranslated regions that modify the rate or efficiency of translation.

[0170] Examples of useful expression control sequences for a prokaryote, e.g., E. coli, will include a promoter, often a phage promoter, such as phage lambda pL promoter, the trc promoter, a hybrid derived from the trp and lac promoters, the bacteriophage T7 promoter (in E. coli cells engineered to express the T7 polymerase), the TAC or TRC system, the major operator and promoter regions of phage lambda, the control regions of fd coat protein, and the araBAD operon. Prokaryotic expression vectors may further include transcription terminators, such as the aspA terminator, and elements that facilitate translation, such as a consensus ribosome binding site and translation termination codon, Schomer et al., Proc. Natl. Acad. Sci. USA 83: 8506-8510 (1986).

[0171] Expression control sequences for yeast cells, typically S. cerevisiae, will include a yeast promoter, such as the CYC1 promoter, the GAL1 promoter, the GAL10 promoter, ADH1 promoter, the promoters of the yeast α-mating system, or the GPD promoter, and will typically have elements that facilitate transcription termination, such as the transcription termination signals from the CYC1 or ADH1 gene.

[0172] Expression vectors useful for expressing proteins in mammalian cells will include a promoter active in mammalian cells. These promoters include, but are not limited to, those derived from mammalian viruses, such as the enhancer-promoter sequences from the immediate early gene of the human cytomegalovirus (CMV), the enhancer-promoter sequences from the Rous sarcoma virus long terminal repeat (RSV LTR), the enhancer-promoter from SV40 and the early and late promoters of adenovirus. Other expression control sequences include the promoter for 3-phosphoglycerate kinase or other glycolytic enzymes, the promoters of acid phosphatase. Other expression control sequences include those from the gene comprising the HSNA of interest. Often, expression is enhanced by incorporation of polyadenylation sites, such as the late SV40 polyadenylation site and the polyadenylation signal and transcription termination sequences from the bovine growth hormone (BGH) gene, and ribosome binding sites. Furthermore, vectors can include introns, such as intron II of rabbit β-globin gene and the SV40 splice elements.

[0173] Preferred nucleic acid vectors also include a selectable or amplifiable marker gene and means for amplifying the copy number of the gene of interest. Such marker genes are well known in the art. Nucleic acid vectors may also comprise stabilizing sequences (e.g., ori- or ARS-like sequences and telomere-like sequences), or may alternatively be designed to favor directed or non-directed integration into the host cell genome. In a preferred embodiment, nucleic acid sequences of this invention are inserted in frame into an expression vector that allows a high level expression of an RNA which encodes a protein comprising the encoded nucleic acid sequence of interest. Nucleic acid cloning and sequencing methods are well known to those of skill in the art and are described in an assortment of laboratory manuals, including Sambrook (1989), supra, Sambrook (2000), supra; and Ausubel (1992), supra, Ausubel (1999), supra. Product information from manufacturers of biological, chemical and immunological reagents also provide useful information.

[0174] Expression vectors may be either constitutive or inducible. Inducible vectors include either naturally inducible promoters, such as the trc promoter, which is regulated by the lac operon, and the pL promoter, which is regulated by tryptophan, the MMTV-LTR promoter, which is inducible by dexamethasone, or can contain synthetic promoters and/or additional elements that confer inducible control on adjacent promoters. Examples of inducible synthetic promoters are the hybrid Plac/ara-1 promoter and the PLtetO-1 promoter. The PLtetO-1 promoter takes advantage of the high expression levels from the PL promoter of phage lambda, but replaces the lambda repressor sites with two copies of operator 2 of the Tn10 tetracycline resistance operon, causing this promoter to be tightly repressed by the Tet repressor protein and induced in response to tetracycline (Tc) and Tc derivatives such as anhydrotetracycline. Vectors may also be inducible because they contain hormone response elements, such as the glucocorticoid response element (GRE) and the estrogen response element (ERE), which can confer hormone inducibility where vectors are used for expression in cells having the respective hormone receptors. To reduce background levels of expression, elements responsive to ecdysone, an insect hormone, can be used instead, with coexpression of the ecdysone receptor.

[0175] In one embodiment of the invention, expression vectors can be designed to fuse the expressed polypeptide to small protein tags that facilitate purification and/or visualization. Such tags include a polyhistidine tag that facilitates purification of the fusion protein by immobilized metal affinity chromatography, for example using NiNTA resin (Qiagen Inc., Valencia, Calif., USA) or TALON™ resin (cobalt immobilized affinity chromatography medium, Clontech Labs, Palo Alto, Calif., USA). The fusion protein can include a chitin-binding tag and self-excising intein, permitting chitin-based purification with self-removal of the fused tag (IMPACT™ system, New England Biolabs, Inc., Beverley, Mass., USA). Alternatively, the fusion protein can include a calmodulin-binding peptide tag, permitting purification by calmodulin affinity resin (Stratagene, La Jolla, Calif., USA), or a specifically excisable fragment of the biotin carboxylase carrier protein, permitting purification of in vivo biotinylated protein using an avidin resin and subsequent tag removal (Promega, Madison, Wis., USA). As another useful alternative, the polypeptides of the present invention can be expressed as a fusion to glutathione-5-transferase, the affinity and specificity of binding to glutathione permitting purification using glutathione affinity resins, such as Glutathione-Superflow Resin (Clontech Laboratories, Palo Alto, Calif., USA), with subsequent elution with free glutathione. Other tags include, for example, the Xpress epitope, detectable by anti-Xpress antibody (Invitrogen, Carlsbad, Calif., USA), a myc tag, detectable by anti-myc tag antibody, the V5 epitope, detectable by anti-V5 antibody (Invitrogen, Carlsbad, Calif., USA), FLAG® epitope, detectable by anti-FLAG® antibody (Stratagene, La Jolla, Calif., USA), and the HA epitope, detectable by anti-HA antibody.

[0176] For secretion of expressed polypeptides, vectors can include appropriate sequences that encode secretion signals, such as leader peptides. For example, the pSecTag2 vectors (Invitrogen, Carlsbad, Calif., USA) are 5.2 kb mammalian expression vectors that carry the secretion signal from the V-J2-C region of the mouse Ig kappa-chain for efficient secretion of recombinant proteins from a variety of mammalian cell lines.

[0177] Expression vectors can also be designed to fuse proteins encoded by the heterologous nucleic acid insert to polypeptides that are larger than purification and/or identification tags. Useful protein fusions include those that permit display of the encoded protein on the surface of a phage or cell, fusions to intrinsically fluorescent proteins, such as those that have a green fluorescent protein (GFP)-like chromophore, fusions to the IgG Fc region, and fusions for use in two hybrid systems.

[0178] Vectors for phage display fuse the encoded polypeptide to, e.g., the gene III protein (pIII) or gene VIII protein (pVIII) for display on the surface of filamentous phage, such as M13. See Barbas et al., Phage Display: A Laboratory Manual, Cold Spring Harbor Laboratory Press (2001); Kay et al. (eds.), Phage Display of Peptides and Proteins: A Laboratory Manual, Academic Press, Inc., (1996); Abelson et al. (eds.), Combinatorial Chemistry (Methods in Enzymology, Vol. 267) Academic Press (1996). Vectors for yeast display, e.g. the pYD1 yeast display vector (Invitrogen, Carlsbad, Calif., USA), use the α-agglutinin yeast adhesion receptor to display recombinant protein on the surface of S. cerevisiae. Vectors for mammalian display, e.g., the pDisplay™ vector (Invitrogen, Carlsbad, Calif., USA), target recombinant proteins using an N-terminal cell surface targeting signal and a C-terminal transmembrane anchoring domain of platelet derived growth factor receptor.

[0179] A wide variety of vectors now exist that fuse proteins encoded by heterologous nucleic acids to the chromophore of the substrate-independent, intrinsically fluorescent green fluorescent protein from Aequorea victoria (“GFP”) and its variants. The GFP-like chromophore can be selected from GFP-like chromophores found in naturally occurring proteins, such as A. victoria GFP (GenBank accession number AAA27721), Renilla reniformis GFP, FP583 (GenBank accession no. AF168419) (DsRed), FP593 (AF272711), FP483 (AF168420), FP484 (AF168424), FP595 (AF246709), FP486 (AF168421), FP538 (AF168423), and FP506 (AF168422), and need include only so much of the native protein as is needed to retain the chromophore's intrinsic fluorescence. Methods for determining the minimal domain required for fluorescence are known in the art. See Li et al., J. Biol. Chem. 272: 28545-28549 (1997). Alternatively, the GFP-like chromophore can be selected from GFP-like chromophores modified from those found in nature. The methods for engineering such modified GFP-like chromophores and testing them for fluorescence activity, both alone and as part of protein fusions, are well known in the art. See Heim et al., Curr. Biol. 6: 178-182 (1996) and Palm et al., Methods Enzymol. 302: 378-394 (1999). A variety of such modified chromophores are now commercially available and can readily be used in the fusion proteins of the present invention. These include EGFP (“enhanced GFP”), EBFP (“enhanced blue fluorescent protein”), BFP2, EYFP (“enhanced yellow fluorescent protein”), ECFP (“enhanced cyan fluorescent protein”) or Citrine. EGFP (see, e.g, Cormack et al., Gene 173: 33-38 (1996); U.S. Pat. Nos. 6,090,919 and 5,804,387, the disclosures of which are incorporated herein by reference in their entireties) is found on a variety of vectors, both plasmid and viral, which are available commercially (Clontech Labs, Palo Alto, Calif., USA); EBFP is optimized for expression in mammalian cells whereas BFP2, which retains the original jellyfish codons, can be expressed in bacteria (see, e.g., Heim et al., Curr. Biol. 6: 178-182 (1996) and Cormack et al., Gene 173: 33-38 (1996)). Vectors containing these blue-shifted variants are available from Clontech Labs (Palo Alto, Calif., USA). Vectors containing EYFP, ECFP (see, e.g., Heim et al., Curr. Biol. 6: 178-182 (1996); Miyawaki et al., Nature 388: 882-887 (1997)) and Citrine (see, e.g., Heikal et al., Proc. Natl. Acad. Sci. USA 97: 11996-12001 (2000)) are also available from Clontech Labs. The GFP-like chromophore can also be drawn from other modified GFPs, including those described in U.S. Pat. Nos. 6,124,128; 6,096,865; 6,090,919; 6,066,476; 6,054,321; 6,027,881; 5,968,750; 5,874,304; 5,804,387; 5,777,079; 5,741,668; and 5,625,048, the disclosures of which are incorporated herein by reference in their entireties. See also Conn (ed.), Green Fluorescent Protein (Methods in Enzymology, Vol. 302), Academic Press, Inc. (1999); Yang, et al., J Biol Chem, 273: 8212-6 (1998); Bevis et al., Nature Biotechnology, 20:83-7 (2002). The GFP-like chromophore of each of these GFP variants can usefully be included in the fusion proteins of the present invention.

[0180] Fusions to the IgG Fc region increase serum half-life of protein pharmaceutical products through interaction with the FcRn receptor (also denominated the FcRp receptor and the Brambell receptor, FcRb), further described in International Patent Application nos. WO 97/43316, WO 97/34631, WO 96/32478, WO 96/18412, the disclosures of which are incorporated herein by reference in their entireties.

[0181] For long-term, high-yield recombinant production of the polypeptides of the present invention, stable expression is preferred. Stable expression is readily achieved by integration into the host cell genome of vectors having selectable markers, followed by selection of these integrants. Vectors such as pUB6/V5-His A, B, and C (Invitrogen, Carlsbad, Calif., USA) are designed for high-level stable expression of heterologous proteins in a wide range of mammalian tissue types and cell lines. pUB6/V5-His uses the promoter/enhancer sequence from the human ubiquitin C gene to drive expression of recombinant proteins: expression levels in 293, CHO, and NIH3T3 cells are comparable to levels from the CMV and human EF-1a promoters. The bsd gene permits rapid selection of stably transfected mammalian cells with the potent antibiotic blasticidin.

[0182] Replication incompetent retroviral vectors, typically derived from Moloney murine leukemia virus, also are useful for creating stable transfectants having integrated provirus. The highly efficient transduction machinery of retroviruses, coupled with the availability of a variety of packaging cell lines such as RetroPack™ PT 67, EcoPack2™-293, AmphoPack-293, and GP2-293 cell lines (all available from Clontech Laboratories, Palo Alto, Calif., USA) allow a wide host range to be infected with high efficiency; varying the multiplicity of infection readily adjusts the copy number of the integrated provirus.

[0183] Of course, not all vectors and expression control sequences will function equally well to express the nucleic acid molecules of this invention. Neither will all hosts function equally well with the same expression system. However, one of skill in the art may make a selection among these vectors, expression control sequences and hosts without undue experimentation and without departing from the scope of this invention. For example, in selecting a vector, the host must be considered because the vector must be replicated in it. The vector's copy number, the ability to control that copy number, the ability to control integration, if any, and the expression of any other proteins encoded by the vector, such as antibiotic or other selection markers, should also be considered. The present invention further includes host cells comprising the vectors of the present invention, either present episomally within the cell or integrated, in whole or in part, into the host cell chromosome. Among other considerations, some of which are described above, a host cell strain may be chosen for its ability to process the expressed polypeptide in the desired fashion. Such post-translational modifications of the polypeptide include, but are not limited to, acetylation, carboxylation, glycosylation, phosphorylation, lipidation, and acylation, and it is an aspect of the present invention to provide HSPs with such post-translational modifications.

[0184] In selecting an expression control sequence, a variety of factors should also be considered. These include, for example, the relative strength of the sequence, its controllability, and its compatibility with the nucleic acid molecules of this invention, particularly with regard to potential secondary structures. Unicellular hosts should be selected by consideration of their compatibility with the chosen vector, the toxicity of the product coded for by the nucleic acid sequences of this invention, their secretion characteristics, their ability to fold the polypeptide correctly, their fermentation or culture requirements, and the ease of purification from them of the products coded for by the nucleic acid molecules of this invention.

[0185] The recombinant nucleic acid molecules and more particularly, the expression vectors of this invention may be used to express the polypeptides of this invention as recombinant polypeptides in a heterologous host cell. The polypeptides of this invention may be full-length or less than full-length polypeptide fragments recombinantly expressed from the nucleic acid molecules according to this invention. Such polypeptides include analogs, derivatives and muteins that may or may not have biological activity.

[0186] Vectors of the present invention will also often include elements that permit in vitro transcription of RNA from the inserted heterologous nucleic acid. Such vectors typically include a phage promoter, such as that from T7, T3, or SP6, flanking the nucleic acid insert. Often two different such promoters flank the inserted nucleic acid, permitting separate in vitro production of both sense and antisense strands.

[0187] Transformation and other methods of introducing nucleic acids into a host cell (e.g., conjugation, protoplast transformation or fusion, transfection, electroporation, liposome delivery, membrane fusion techniques, high velocity DNA-coated pellets, viral infection and protoplast fusion) can be accomplished by a variety of methods which are well known in the art (See, for instance, Ausubel, supra, and Sambrook et al., supra). Bacterial, yeast, plant or mammalian cells are transformed or transfected with an expression vector, such as a plasmid, a cosmid, or the like, wherein the expression vector comprises the nucleic acid of interest. Alternatively, the cells may be infected by a viral expression vector comprising the nucleic acid of interest. Depending upon the host cell, vector, and method of transformation used, transient or stable expression of the polypeptide will be constitutive or inducible. One having ordinary skill in the art will be able to decide whether to express a polypeptide transiently or stably, and whether to express the protein constitutively or inducibly.

[0188] A wide variety of unicellular host cells are useful in expressing the DNA sequences of this invention. These hosts may include well known eukaryotic and prokaryotic hosts, such as strains of, fungi, yeast, insect cells such as Spodoptera frugiperda (SF9), animal cells such as CHO, as well as plant cells in tissue culture. Representative examples of appropriate host cells include, but are not limited to, bacterial cells, such as E. coli, Caulobacter crescentus, Streptomyces species, and Salmonella typhimurium; yeast cells, such as Saccharomyces cerevisiae, Schizosaccharomyces pombe, Pichia pastoris, Pichia methanolica; insect cell lines, such as those from Spodoptera frugiperda—e.g., Sf9 and Sf21 cell lines, and expresSF™ cells (Protein Sciences Corp., Meriden, Conn., USA)—Drosophila S2 cells, and Trichoplusia ni High Five® Cells (Invitrogen, Carlsbad, Calif., USA); and mammalian cells. Typical mammalian cells include BHK cells, BSC 1 cells, BSC 40 cells, BMT 10 cells, VERO cells, COS1 cells, COS7 cells, Chinese hamster ovary (CHO) cells, 3T3 cells, NIH 3T3 cells, 293 cells, HEPG2 cells, HeLa cells, L cells, MDCK cells, HEK293 cells, WI38 cells, murine ES cell lines (e.g., from strains 129/SV, C57/BL6, DBA-1, 129/SVJ), K562 cells, Jurkat cells, and BW5147 cells. Other mammalian cell lines are well known and readily available from the American Type Culture Collection (ATCC) (Manassas, Va., USA) and the National Institute of General Medical Sciences (NIGMS) Human Genetic Cell Repository at the Coriell Cell Repositories (Camden, N.J., USA). Cells or cell lines derived from hepatic are particularly preferred because they may provide a more native post-translational processing. Particularly preferred are human hepatic cells.

[0189] Particular details of the transfection, expression and purification of recombinant proteins are well documented and are understood by those of skill in the art. Further details on the various technical aspects of each of the steps used in recombinant production of foreign genes in bacterial cell expression systems can be found in a number of texts and laboratory manuals in the art. See, e.g., Ausubel (1992), supra, Ausubel (1999), supra, Sambrook (1989), supra, and Sambrook (2001), supra.

[0190] Methods for introducing the vectors and nucleic acid molecules of the present invention into the host cells are well known in the art; the choice of technique will depend primarily upon the specific vector to be introduced and the host cell chosen.

[0191] Nucleic acid molecules and vectors may be introduced into prokaryotes, such as E. coli, in a number of ways. For instance, phage lambda vectors will typically be packaged using a packaging extract (e.g., Gigapack® packaging extract, Stratagene, La Jolla, Calif., USA), and the packaged virus used to infect E. coli.

[0192] Plasmid vectors will typically be introduced into chemically competent or electrocompetent bacterial cells. E. coli cells can be rendered chemically competent by treatment, e.g., with CaCl₂, or a solution of Mg²⁺, Mn²⁺, Ca²⁺, Rb⁺ or K⁺, dimethyl sulfoxide, dithiothreitol, and hexamine cobalt (III), Hanahan, J. Mol. Biol. 166(4):557-80 (1983), and vectors introduced by heat shock. A wide variety of chemically competent strains are also available commercially (e.g. Epicurian Coli® XL10-Gold® Ultracompetent Cells (Stratagene, La Jolla, Calif., USA); DH5α competent cells (Clontech Laboratories, Palo Alto, Calif., USA); and TOP10 Chemically Competent E. coli Kit (Invitrogen, Carlsbad, Calif., USA)). Bacterial cells can be rendered electrocompetent to take up exogenous DNA by electroporation by various pre-pulse treatments; vectors are introduced by electroporation followed by subsequent outgrowth in selected media. An extensive series of protocols is provided by BioRad (Richmond, Calif., USA).

[0193] Vectors can be introduced into yeast cells by spheroplasting, treatment with lithium salts, electroporation, or protoplast fusion. Spheroplasts are prepared by the action of hydrolytic enzymes such as a snail-gut extract, usually denoted Glusulase or Zymolyase, or an enzyme from Arthrobacter luteus to remove portions of the cell wall in the presence of osmotic stabilizers, typically 1 M sorbitol. DNA is added to the spheroplasts, and the mixture is co-precipitated with a solution of polyethylene glycol (PEG) and Ca²⁺. Subsequently, the cells are resuspended in a solution of sorbitol, mixed with molten agar and then layered on the surface of a selective plate containing sorbitol.

[0194] For lithium-mediated transformation, yeast cells are treated with lithium acetate to permeabilize the cell wall, DNA is added and the cells are co-precipitated with PEG. The cells are exposed to a brief heat shock, washed free of PEG and lithium acetate, and subsequently spread on plates containing ordinary selective medium. Increased frequencies of transformation are obtained by using specially-prepared single-stranded carrier DNA and certain organic solvents. Schiestl et al., Curr. Geizet. 16(5-6): 339-46 (1989).

[0195] For electroporation, freshly-grown yeast cultures are typically washed, suspended in an osmotic protectant, such as sorbitol, mixed with DNA, and the cell suspension pulsed in an electroporation device. Subsequently, the cells are spread on the surface of plates containing selective media. Becker et al., Methods Enzymol. 194: 182-187 (1991). The efficiency of transformation by electroporation can be increased over 100-fold by using PEG, single-stranded carrier DNA and cells that are in late log-phase of growth. Larger constructs, such as YACs, can be introduced by protoplast fusion.

[0196] Mammalian and insect cells can be directly infected by packaged viral vectors, or transfected by chemical or electrical means. For chemical transfection, DNA can be coprecipitated with CaPO₄ or introduced using liposomal and nonliposomal lipid-based agents. Commercial kits are available for CaPO₄ transfection (CalPhos™ Mammalian Transfection Kit, Clontech Laboratories, Palo Alto, Calif., USA), and lipid-mediated transfection can be practiced using commercial reagents, such as LIPOFECTAMINE™ 2000, LIPOFECTAMINE™ Reagent, CELLFECTIN® Reagent, and LIPOFECTIN® Reagent (Invitrogen, Carlsbad, Calif., USA), DOTAP Liposomal Transfection Reagent, FuGENE 6, X-tremeGENE Q2, DOSPER, (Roche Molecular Biochemicals, Indianapolis, Ind. USA), Effectene™, PolyFect®, Superfect® (Qiagen, Inc., Valencia, Calif., USA). Protocols for electroporating mammalian cells can be found in, for example, Norton et al. (eds.), Gene Transfer Methods: Introducing DNA into Living Cells and Organisms, BioTechniques Books, Eaton Publishing Co. (2000). Other transfection techniques include transfection by particle bombardment and microinjection. See, e.g., Cheng et al., Proc. Natl. Acad. Sci. USA 90(10): 4455-9 (1993); Yang et al., Proc. Natl. Acad. Sci. USA 87(24): 9568-72 (1990).

[0197] Production of the recombinantly produced proteins of the present invention can optionally be followed by purification.

[0198] Purification of recombinantly expressed proteins is now well within the skill in the art and thus need not be detailed here. See, e.g., Thorner et al. (eds.), Applications of Chimeric Genes and Hybrid Proteins, Part A: Gene Expression and Protein Purification (Methods in Enzymology, Vol. 326), Academic Press (2000); Harbin (ed.), Cloning, Gene Expression and Protein Purification: Experimental Procedures and Process Rationale, Oxford Univ. Press (2001); Marshak et al., Strategies for Protein Purification and Characterization: A Laboratory Course Manual, Cold Spring Harbor Laboratory Press (1996); and Roe (ed.), Protein Purification Applications, Oxford University Press (2001).

[0199] Briefly, however, if purification tags have been fused through use of an expression vector that appends such tag, purification can be effected, at least in part, by means appropriate to the tag, such as use of immobilized metal affinity chromatography for polyhistidine tags. Other techniques common in the art include ammonium sulfate fractionation, immunoprecipitation, fast protein liquid chromatography (FPLC), high performance liquid chromatography (HPLC), and preparative gel electrophoresis.

Polypeptides, Including Fragments Muteins, Homologous Proteins, Allelic Variants, Analogs and Derivatives

[0200] Another aspect of the invention relates to polypeptides encoded by the nucleic acid molecules described herein. In a preferred embodiment, the polypeptide is a hepatic specific polypeptide (HSP). In an even more preferred embodiment, the polypeptide comprises an amino acid sequence of SEQ ID NO:410-611 or is derived from a polypeptide having the amino acid sequence of SEQ ID NO: 410-611. A polypeptide as defined herein may be produced recombinantly, as discussed supra, may be isolated from a cell that naturally expresses the protein, or may be chemically synthesized following the teachings of the specification and using methods well known to those having ordinary skill in the art.

[0201] Polypeptides of the present invention may also comprise a part or fragment of a HSP. In a preferred embodiment, the fragment is derived from a polypeptide having an amino acid sequence selected from the group consisting of SEQ ID NO: 410-611. Polypeptides of the present invention comprising a part or fragment of an entire HSP may or may not be HSPs. For example, a full-length polypeptide may be hepatic-specific, while a fragment thereof may be found in other tissues as well as in hepatic. A polypeptide that is not a HSP, whether it is a fragment, analog, mutein, homologous protein or derivative, is nevertheless useful, especially for immunizing animals to prepare anti-HSP antibodies. In a preferred embodiment, the part or fragment is a HSP. Methods of determining whether a polypeptide of the present invention is a HSP are described infra.

[0202] Polypeptides of the present invention comprising fragments of at least 6 contiguous amino acids are also useful in mapping B cell and T cell epitopes of the reference protein. See, e.g., Geysen et al., Proc. Natl. Acad. Sci. USA 81: 3998-4002 (1984) and U.S. Pat. Nos. 4,708,871 and 5,595,915, the disclosures of which are incorporated herein by reference in their entireties. Because the fragment need not itself be immunogenic, part of an immunodominant epitope, nor even recognized by native antibody, to be useful in such epitope mapping, all fragments of at least 6 amino acids of a polypeptide of the present invention have utility in such a study.

[0203] Polypeptides of the present invention comprising fragments of at least 8 contiguous amino acids, often at least 15 contiguous amino acids, are useful as immunogens for raising antibodies that recognize polypeptides of the present invention. See, e.g., Lerner, Nature 299: 592-596 (1982); Shinnick et al., Annu. Rev. Microbiol. 37: 425-46 (1983); Sutcliffe et al., Science 219: 660-6 (1983). As further described in the above-cited references, virtually all 8-mers, conjugated to a carrier, such as a protein, prove immunogenic and are capable of eliciting antibody for the conjugated peptide; accordingly, all fragments of at least 8 amino acids of the polypeptides of the present invention have utility as immunogens.

[0204] Polypeptides comprising fragments of at least 8, 9, 10 or 12 contiguous amino acids are also useful as competitive inhibitors of binding of the entire polypeptide, or a portion thereof, to antibodies (as in epitope mapping), and to natural binding partners, such as subunits in a multimeric complex or to receptors or ligands of the subject protein; this competitive inhibition permits identification and separation of molecules that bind specifically to the polypeptide of interest. See U.S. Pat. Nos. 5,539,084 and 5,783,674, incorporated herein by reference in their entireties.

[0205] The polypeptide of the present invention thus preferably is at least 6 amino acids in length, typically at least 8, 9, 10 or 12 amino acids in length, and often at least 15 amino acids in length. Often, the polypeptide of the present invention is at least 20 amino acids in length, even 25 amino acids, 30 amino acids, 35 amino acids, or 50 amino acids or more in length. Of course, larger polypeptides having at least 75 amino acids, 100 amino acids, or even 150 amino acids are also useful, and at times preferred.

[0206] One having ordinary skill in the art can produce fragments by truncating the nucleic acid molecule, e.g., a HSNA, encoding the polypeptide and then expressing it recombinantly. Alternatively, one can produce a fragment by chemically synthesizing a portion of the full-length polypeptide. One may also produce a fragment by enzymatically cleaving either a recombinant polypeptide or an isolated naturally occurring polypeptide. Methods of producing polypeptide fragments are well known in the art. See, e.g., Sambrook (1989), supra; Sambrook (2001), supra; Ausubel (1992), supra; and Ausubel (1999), supra. In one embodiment, a polypeptide comprising only a fragment, preferably a fragment of a HSP, may be produced by chemical or enzymatic cleavage of a HSP polypeptide. In a preferred embodiment, a polypeptide fragment is produced by expressing a nucleic acid molecule of the present invention encoding a fragment, preferably of a HSP, in a host cell.

[0207] Polypeptides of the present invention are also inclusive of mutants, fusion proteins, homologous proteins and allelic variants.

[0208] A mutant protein, or mutein, may have the same or different properties compared to a naturally occurring polypeptide and comprises at least one amino acid insertion, duplication, deletion, rearrangement or substitution compared to the amino acid sequence of a native polypeptide. Small deletions and insertions can often be found that do not alter the function of a protein. Muteins may or may not be hepatic-specific. Preferably, the mutein is hepatic-specific. More preferably the mutein is a polypeptide that comprises at least one amino acid insertion, duplication, deletion, rearrangement or substitution compared to the amino acid sequence of SEQ ID NO: 410-611. Accordingly, in a preferred embodiment, the mutein is one that exhibits at least 50% sequence identity, more preferably at least 60% sequence identity, even more preferably at least 70%, yet more preferably at least 80% sequence identity to a HSP comprising an amino acid sequence of SEQ ID NO: 410-611. In a yet more preferred embodiment, the mutein exhibits at least 85%, more preferably 90%, even more preferably 95% or 96%, and yet more preferably at least 97%, 98%, 99% or 99.5% sequence identity to a HSP comprising an amino acid sequence of SEQ ID NO: 410-611.

[0209] A mutein may be produced by isolation from a naturally occurring mutant cell, tissue or organism. A mutein may be produced by isolation from a cell, tissue or organism that has been experimentally mutagenized. Alternatively, a mutein may be produced by chemical manipulation of a polypeptide, such as by altering the amino acid residue to another amino acid residue using synthetic or semi-synthetic chemical techniques. In a preferred embodiment, a mutein is produced from a host cell comprising a mutated nucleic acid molecule compared to the naturally occurring nucleic acid molecule. For instance, one may produce a mutein of a polypeptide by introducing one or more mutations into a nucleic acid molecule of the invention and then expressing it recombinantly. These mutations may be targeted, in which particular encoded amino acids are altered, or may be untargeted, in which random encoded amino acids within the polypeptide are altered. Muteins with random amino acid alterations can be screened for a particular biological activity or property, particularly whether the polypeptide is hepatic-specific, as described below. Multiple random mutations can be introduced into the gene by methods well known to the art, e.g., by error-prone PCR, shuffling, oligonucleotide-directed mutagenesis, assembly PCR, sexual PCR mutagenesis, in vivo mutagenesis, cassette mutagenesis, recursive ensemble mutagenesis, exponential ensemble mutagenesis and site-specific mutagenesis. Methods of producing muteins with targeted or random amino acid alterations are well known in the art. See, e.g., Sambrook (1989), supra; Sambrook (2001), supra; Ausubel (1992), supra; and Ausubel (1999), as well as U.S. Pat. No. 5,223,408, which is herein incorporated by reference in its entirety.

[0210] The invention also contemplates polypeptides that are homologous to a polypeptide of the invention. In a preferred embodiment, the polypeptide is homologous to a HSP. In an even more preferred embodiment, the polypeptide is homologous to a HSP selected from the group having an amino acid sequence of SEQ ID NO: 410-611. By homologous polypeptide it is means one that exhibits significant sequence identity to a HSP, preferably a HSP having an amino acid sequence of SEQ ID NO: 410-611. By significant sequence identity it is meant that the homologous polypeptide exhibits at least 50% sequence identity, more preferably at least 60% sequence identity, even more preferably at least 70%, yet more preferably at least 80% sequence identity to a HSP comprising an amino acid sequence of SEQ ID NO: 410-611. More preferred are homologous polypeptides exhibiting at least 85%, more preferably 90%, even more preferably 95% or 96%, and yet more preferably at least 97% or 98% sequence identity to a HSP comprising an amino acid sequence of SEQ ID NO: 410-611. Most preferably, the homologous polypeptide exhibits at least 99%, more preferably 99.5%, even more preferably 99.6%, 99.7%, 99.8% or 99.9% sequence identity to a HSP comprising an amino acid sequence of SEQ ID NO: 410-611. In a preferred embodiment, the amino acid substitutions of the homologous polypeptide are conservative amino acid substitutions as discussed above.

[0211] Homologous polypeptides of the present invention also comprise polypeptide encoded by a nucleic acid molecule that selectively hybridizes to a HSNA or an antisense sequence thereof. In this embodiment, it is preferred that the homologous polypeptide be encoded by a nucleic acid molecule that hybridizes to a HSNA under low stringency, moderate stringency or high stringency conditions, as defined herein. More preferred is a homologous polypeptide encoded by a nucleic acid sequence which hybridizes to a HSNA selected from the group consisting of SEQ ID NO: 1-409 or a homologous polypeptide encoded by a nucleic acid molecule that hybridizes to a nucleic acid molecule that encodes a HSP, preferably an HSP of SEQ ID NO:410-611 under low stringency, moderate stringency or high stringency conditions, as defined herein.

[0212] Homologous polypeptides of the present invention may be naturally occurring and derived from another species, especially one derived from another primate, such as chimpanzee, gorilla, rhesus macaque, or baboon, wherein the homologous polypeptide comprises an amino acid sequence that exhibits significant sequence identity to that of SEQ ID NO: 410-611. The homologous polypeptide may also be a naturally occurring polypeptide from a human, when the HSP is a member of a family of polypeptides. The homologous polypeptide may also be a naturally occurring polypeptide derived from a non-primate, mammalian species, including without limitation, domesticated species, e.g., dog, cat, mouse, rat, rabbit, guinea pig, hamster, cow, horse, goat or pig. The homologous polypeptide may also be a naturally occurring polypeptide derived from a non-mammalian species, such as birds or reptiles. The naturally occurring homologous protein may be isolated directly from humans or other species. Alternatively, the nucleic acid molecule encoding the naturally occurring homologous polypeptide may be isolated and used to express the homologous polypeptide recombinantly. The homologous polypeptide may also be one that is experimentally produced by random mutation of a nucleic acid molecule and subsequent expression of the nucleic acid molecule. Alternatively, the homologous polypeptide may be one that is experimentally produced by directed mutation of one or more codons to alter the encoded amino acid of a HSP. In a preferred embodiment, the homologous polypeptide encodes a polypeptide that is a HSP.

[0213] Relatedness of proteins can also be characterized using a second functional test, the ability of a first protein competitively to inhibit the binding of a second protein to an antibody. It is, therefore, another aspect of the present invention to provide isolated polpeptide not only identical in sequence to those described with particularity herein, but also to provide isolated polypeptide (“cross-reactive proteins”) that competitively inhibit the binding of antibodies to all or to a portion of various of the isolated polypeptides of the present invention. Such competitive inhibition can readily be determined using immunoassays well known in the art.

[0214] As discussed above, single nucleotide polymorphisms (SNPs) occur frequently in eukaryotic genomes, and the sequence determined from one individual of a species may differ from other allelic forms present within the population. Thus, polypeptides of the present invention are also inclusive of those encoded by an allelic variant of a nucleic acid molecule encoding a HSP. In this embodiment, it is preferred that the polypeptide be encoded by an allelic variant of a gene that encodes a polypeptide having the amino acid sequence selected from the group consisting of SEQ ID NO: 410-611. More preferred is that the polypeptide be encoded by an allelic variant of a gene that has the nucleic acid sequence selected from the group consisting of SEQ ID NO: 1-409.

[0215] Polypeptides of the present invention are also inclusive of derivative polypeptides encoded by a nucleic acid molecule according to the instant invention. In this embodiment, it is preferred that the polypeptide be a HSP. Also preferred are derivative polypeptides having an amino acid sequence selected from the group consisting of SEQ ID NO: 410-611 and which has been acetylated, carboxylated, phosphorylated, glycosylated, ubiquitinated or other PTMs. In another preferred embodiment, the derivative has been labeled with, e.g., radioactive isotopes such as ¹²⁵I, ³²P, ³⁵S, and ³H. In another preferred embodiment, the derivative has been labeled with fluorophores, chemiluminescent agents, enzymes, and antiligands that can serve as specific binding pair members for a labeled ligand.

[0216] Polypeptide modifications are well known to those of skill and have been described in great detail in the scientific literature. Several particularly common modifications, glycosylation, lipid attachment, sulfation, gamma-carboxylation of glutamic acid residues, hydroxylation and ADP-ribosylation, for instance, are described in most basic texts, such as, for instance Creighton, Protein Structure and Molecular Properties, 2nd ed., W. H. Freeman and Company (1993). Many detailed reviews are available on this subject, such as, for example, those provided by Wold, in Johnson (ed.), Posttranslational Covalent Modification of Proteins, pgs. 1-12, Academic Press (1983); Seifter et al., Meth. Enzymol. 182: 626-646 (1990) and Rattan et al., Ann. N.Y. Acad. Sci. 663: 48-62 (1992).

[0217] One may determine whether a polypeptide of the invention is likely to be post-translationally modified by analyzing the sequence of the polypeptide to determine if there are peptide motifs indicative of sites for post-translational modification. There are a number of computer programs that permit prediction of post-translational modifications. See, e.g., www.expasy.org (accessed Nov. 11, 2002), which includes PSORT, for prediction of protein sorting signals and localization sites, SignalP, for prediction of signal peptide cleavage sites, MITOPROT and Predotar, for prediction of mitochondrial targeting sequences, NetOGlyc, for prediction of type O-glycosylation sites in mammalian proteins, big-PI Predictor and DGPI, for prediction of prenylation-anchor and cleavage sites, and NetPhos, for prediction of Ser, Thr and Tyr phosphorylation sites in eukaryotic proteins. Other computer programs, such as those included in GCG, also may be used to determine post-translational modification peptide motifs.

[0218] General examples of types of post-translational modifications include, but are not limited to: (Z)-dehydrobutyrine; 1-chondroitin sulfate-L-aspartic acid ester; 1′-glycosyl-L-tryptophan; 1′-phospho-L-histidine; 1-thioglycine; 2′-(S-L-cysteinyl)-L-histidine; 2′-[3carboxamido(trimethylammonio)propyl]-L-histidine; 2′-alpha-mannosyl-L-tryptophan; 2-methyl-L-glutamine; 2-oxobutanoic acid; 2-pyrrolidone carboxylic acid; 3′-(1′-L-histidyl)-L-tyrosine; 3′-(8alpha-FAD)-L-histidine; 3′-(S-L-cysteinyl)-L-tyrosine; 3′,3″,5′-triiodo-L-thyronine; 3′-4′-phospho-L-tyrosine; 3-hydroxy-L-proline; 3′-methyl-L-histidine; 3-methyl-L-lanthionine; 3′-phospho-L-histidine; 4′-(L-tryptophan)-L-tryptophyl quinone; 42 N-cysteinyl-glycosylphosphatidylinositolethanolamine; 43-(T-L-histidyl)-L-tyrosine; 4-hydroxy-L-arginine; 4-hydroxy-L-lysine; 4-hydroxy-L-proline; 5′-(N-6-L-lysine)-L-topaquinone; 5-hydroxy-L-lysine; 5-methyl-L-arginine; alpha-1-microglobulin-Ig alpha complex chromophore; bis-L-cysteinyl bis-L-histidino diiron disulfide; bis-L-cysteinyl-L-N3′-histidino-L-serinyI tetrairon′ tetrasulfide; chondroitin sulfate D-glucuronyl-D-galactosyl-D-galactosyl-D-xylosyl-L-serine; D-alanine; D-allo-isoleucine; D-asparagine; dehydroalanine; dehydrotyrosine; dermatan 4-sulfate D-glucuronyl-D-galactosyl-D-galactosyl-D-xylosyl-L-serine; D-glucuronyl-N-glycine; dipyrrolylmethanemethyl-L-cysteine; D-leucine; D-methionine; D-phenylalanine; D-serine; D-tryptophan; glycine amide; glycine oxazolecarboxylic acid; glycine thiazolecarboxylic acid; heme P450-bis-L-cysteine-L-tyrosine; heme-bis-L-cysteine; hemediol-L-aspartyl ester-L-glutamyl ester; hemediol-L-aspartyl ester-L-glutamyl ester-L-methionine sulfonium; heme-L-cysteine; heme-L-histidine; heparan sulfate D-glucuronyl-D-galactosyl-D-galactosyl-D-xylosyl-L-serine; heme P450-bis-L-cysteine-L-lysine; hexakis-L-cysteinyl hexairon hexasulfide; keratan sulfate D-glucuronyl-D-galactosyl-D-galactosyl-D-xylosyl-L-threonine; L oxoalanine-lactic acid; L phenyllactic acid; 1′-(8alpha-FAD)-L-histidine; L-2′.4′,5′-topaquinone; L-3′,4′-dihydroxyphenylalanine; L-3′.4′.5′-trihydroxyphenylalanine; L-4′-bromophenylalanine; L-6′-bromotryptophan; L-alanine amide; L-alanyl imidazolinone glycine; L-allysine; L-arginine amide; L-asparagine amide; L-aspartic 4-phosphoric anhydride; L-aspartic acid 1-amide; L-beta-methylthioaspartic acid; L-bromohistidine; L-citrulline; L-cysteine amide; L-cysteine glutathione disulfide; L-cysteine methyl disulfide; L-cysteine methyl ester; L-cysteine oxazolecarboxylic acid; L-cysteine oxazolinecarboxylic acid; L-cysteine persulfide; L-cysteine sulfenic acid; L-cysteine sulfinic acid; L-cysteine thiazolecarboxylic acid; L-cysteinyl homocitryl molybdenum-heptairon-nonasulfide; L-cysteinyl imidazolinone glycine; L-cysteinyl molybdopterin; L-cysteinyl molybdopterin guanine dinucleotide; L-cystine; L-erythro-beta-hydroxyasparagine; L-erythro-beta-hydroxyaspartic acid; L-gamma-carboxyglutamic acid; L-glutamic acid 1-amide; L-glutamic acid 5-methyl ester; L-glutamine amide; L-glutamyl 5-glycerylphosphorylethanolamine; L-histidine amide; L-isoglutamyl-polyglutamic acid; L-isoglutamyl-polyglycine; L-isoleucine amide; L-lanthionine; L-leucine amide; L-lysine amide; L-lysine thiazolecarboxylic acid; L-lysinoalanine; L-methionine amide; L-methionine sulfone; L-phenyalanine thiazolecarboxylic acid; L-phenylalanine amide; L-proline amide; L-selenocysteine; L-selenocysteinyl molybdopterin guanine dinucleotide; L-serine amide; L-serine thiazolecarboxylic acid; L-seryl imidazolinone glycine; L-T-bromophenylalanine; L-T-bromophenylalanine; L-threonine amide; L-thyroxine; L-tryptophan amide; L-tryptophyl quinone; L-tyrosine amide; L-valine amide; meso-lanthionine; N-(L-glutamyl)-L-tyrosine; N-(L-isoaspartyl)-glycine; N-(L-isoaspartyl)-L-cysteine; N,N,N-trimethyl-L-alanine; N,N-dimethyl-L-proline; N2-acetyl-L-lysine; N2-succinyl-L-tryptophan; N4-(ADP-ribosyl)-L-asparagine; N4-glycosyl-L-asparagine; N4-hydroxymethyl-L-asparagine; N4-methyl-L-asparagine; N5-methyl-L-glutamine; N6-1-carboxyethyl-L-lysine; N6-(4-amino hydroxybutyl)-L-lysine; N6-(L-isoglutamyl)-L-lysine; N6-(phospho-5′-adenosine)-L-lysine; N6-(phospho-5′-guanosine)-L-tysine; N6,N6,N6-trimethyl-L-lysine; N6,N6-dimethyl-L-lysine; N6-acetyl-L-lysine; N6-biotinyl-L-lysine; N6-carboxy-L-lysine; N6-formyl-L-lysine; N6-glycyl-L-lysine; N6-lipoyl-L-lysine; N6-methyl-L-lysine; N6-methyl-N-6-poly(N-methyl-propylamine)-L-lysine; N6-mureinyl-L-lysine; N6-myristoyl-L-lysine; N6-palmitoyl-L-lysine; N6-pyridoxal phosphate-L-lysine; N6-pyruvic acid 2-iminyl-L-lysine; N6-retinal-L-lysine; N-acetylglycine; N-acetyl-L-glutamine; N-acetyl-L-alanine; N-acetyl-L-aspartic acid; N-acetyl-L-cysteine; N-acetyl-L-glutamic acid; N-acetyl-L-isoleucine; N-acetyl-L-methionine; N-acetyl-L-proline; N-acetyl-L-serine; N-acetyl-L-threonine; N-acetyl-L-tyrosine; N-acetyl-L-valine; N-alanyl-glycosylphosphatidylinositolethanolamine; N-asparaginyl-glycosylphosphatidylinositolethanolamine; N-aspartyl-glycosylphosphatidylinositolethanolamine; N-formylglycine; N-formyl-L-methionine; N-glycyl-glycosylphosphatidylinositolethanolamine; N-L-glutamyl-poly-L-glutamic acid; N-methylglycine; N-methyl-L-alanine; N-methyl-L-methionine; N-methyl-L-phenylalanine; N-myristoyl-glycine; N-palmitoyl-L-cysteine; N-pyruvic acid 2-iminyl-L-cysteine; N-pyruvic acid 2-iminyl-L-valine; N-seryl-glycosylphosphatidylinositolethanolamine; N-seryl-glycosyHSPhingolipidinositolethanolamine; O-(ADP-ribosyl)-L-serine; O-(phospho-5′-adenosine)-L-threonine; O-(phospho-5′-DNA)-L-serine; O-(phospho-5′-DNA)-L-threonine; O-(phospho-5′rRNA)-L-serine; O-(phosphoribosyl dephospho-coenzyme A)-L-serine; O-(sn-1-glycerophosphoryl)-L-serine; O4′-(8alpha-FAD)-L-tyrosine; O4′-(phospho-5′-adenosine)-L-tyrosine; O4′-(phospho-5′-DNA)-L-tyrosine; O4′-(phospho-5′-RNA)-L-tyrosine; O4′-(phospho-5′-uridine)-L-tyrosine; O4-glycosyl-L-hydroxyproline; O4′-glycosyl-L-tyrosine; O4′-sulfo-L-tyrosine; O5-glycosyl-L-hydroxylysine; O-glycosyl-L-serine; O-glycosyl-L-threonine; omega-N-(ADP-ribosyl)-L-arginine; omega-N-omega-N′-dimethyl-L-arginine; omega-N-methyl-L-arginine; omega-N-omega-N-dimethyl-L-arginine; omega-N-phospho-L-arginine; O′octanoyl-L-serine; O-palmitoyl-L-serine; O-palmitoyl-L-threonine; O-phospho-L-serine; O-phospho-L-threonine; O-phosphopantetheine-L-serine; phycoerythrobilin-bis-L-cysteine; phycourobilin-bis-L-cysteine; pyrroloquinoline quinone; pyruvic acid; S hydroxycinnamyl-L-cysteine; S-(2-aminovinyl)methyl-D-eysteine; S-(2-aminovinyl)-D-cysteine; S-(6-FW-L-cysteine; S-(8alpha-FAD)-L-cysteine; S-(ADP-ribosyl)-L-cysteine; S-(L-isoglutamyl)-L-cysteine; S-12-hydroxyfarnesyl-L-cysteine; S-acetyl-L-cysteine; S-diacylglycerol-L-cysteine; S-diphytanylglycerot diether-L-cysteine; S-farnesyl-L-cysteine; S-geranylgeranyl-L-cysteine; S-glycosyl-L-cysteine; S-glycyl-L-cysteine; S-methyl-L-cysteine; S-nitrosyl-L-cysteine; S-palmitoyl-L-cysteine; S-phospho-L-cysteine; S-phycobiliviolin-L-cysteine; S-phycocyanobilin-L-cysteine; S-phycoerythrobilin-L-cysteine; S-phytochromobilin-L-cysteine; S-selenyl-L-cysteine; S-sulfo-L-cysteine; tetrakis-L-cysteinyl diiron disulfide; tetrakis-L-cysteinyl iron; tetrakis-L-cysteinyl tetrairon tetrasulfide; trans-2,3-cis 4-dihydroxy-L-proline; tris-L-cysteinyl triiron tetrasulfide; tris-L-cysteinyl triiron trisulfide; tris-L-cysteinyl-L-aspartato tetrairon tetrasulfide; tris-L-cysteinyl-L-cysteine persulfido-bis-L-glutamato-L-histidino tetrairon disulfide trioxide; tris-L-cysteinyl-L-N3′-histidino tetrairon tetrasulfide; tris-L-cysteinyl-L-N1′-histidino tetrairon tetrasulfide; and tris-L-cysteinyl-L-serinyl tetrairon tetrasulfide.

[0219] Additional examples of PTMs may be found in web sites such as the Delta Mass database based on Krishna, R. G. and F. Wold (1998). Posttranslational Modifications. Proteins—Analysis and Design. R. H. Angeletti. San Diego, Academic Press. 1: 121-206; Methods in Enzymology, 193, J. A. McClosky (ed) (1990), pages 647-660; Methods in Protein Sequence Analysis edited by Kazutomo Imahori and Fumio Sakiyama, Plenum Press, (1993) “Post-translational modifications of proteins” R. G. Krishna and F. Wold pages 167-172; “GlycoSuiteDB: a new curated relational database of glycoprotein glycan structures and their biological sources” Cooper et al. Nucleic Acids Res. 29; 332-335 (2001) “O-GLYCBASE version 4.0: a revised database of O-glycosylated proteins” Gupta et al. Nucleic Acids Research, 27: 370-372 (1999); and “PhosphoBase, a database of phosphorylation sites: release 2.0.”, Kreegipuu et al. Nucleic Acids Res 27(1):237-239 (1999) see also, WO 02/21139A2, the disclosure of which is incorporated herein by reference in its entirety.

[0220] Tumorigenesis is often accompanied by alterations in the post-translational modifications of proteins. Thus, in another embodiment, the invention provides polypeptides from cancerous cells or tissues that have altered post-translational modifications compared to the post-translational modifications of polypeptides from normal cells or tissues. A number of altered post-translational modifications are known. One common alteration is a change in phosphorylation state, wherein the polypeptide from the cancerous cell or tissue is hyperphosphorylated or hypophosphorylated compared to the polypeptide from a normal tissue, or wherein the polypeptide is phosphorylated on different residues than the polypeptide from a normal cell. Another common alteration is a change in glycosylation state, wherein the polypeptide from the cancerous cell or tissue has more or less glycosylation than the polypeptide from a normal tissue, and/or wherein the polypeptide from the cancerous cell or tissue has a different type of glycosylation than the polypeptide from a noncancerous cell or tissue. Changes in glycosylation may be critical because carbohydrate-protein and carbohydrate-carbohydrate interactions are important in cancer cell progression, dissemination and invasion. See, e.g., Barchi, Curr. Pharm. Des. 6: 485-501 (2000), Verma, Cancer Biochem. Biophys. 14: 151-162 (1994) and Dennis et al., Bioessays 5: 412-421 (1999).

[0221] Another post-translational modification that may be altered in cancer cells is prenylation. Prenylation is the covalent attachment of a hydrophobic prenyl group (either farnesyl or geranylgeranyl) to a polypeptide. Prenylation is required for localizing a protein to a cell membrane and is often required for polypeptide function. For instance, the Ras superfamily of GTPase signalling proteins must be prenylated for function in a cell. See, e.g., Prendergast et al., Semin. Cancer Biol. 10: 443-452 (2000) and Khwaja et al., Lancet 355: 741-744 (2000).

[0222] Other post-translation modifications that may be altered in cancer cells include, without limitation, polypeptide methylation, acetylation, arginylation or racemization of amino acid residues. In these cases, the polypeptide from the cancerous cell may exhibit either increased or decreased amounts of the post-translational modification compared to the corresponding polypeptides from noncancerous cells.

[0223] Other polypeptide alterations in cancer cells include abnormal polypeptide cleavage of proteins and aberrant protein-protein interactions. Abnormal polypeptide cleavage may be cleavage of a polypeptide in a cancerous cell that does not usually occur in a normal cell, or a lack of cleavage in a cancerous cell, wherein the polypeptide is cleaved in a normal cell. Aberrant protein-protein interactions may be either covalent cross-linking or non-covalent binding between proteins that do not normally bind to each other. Alternatively, in a cancerous cell, a protein may fail to bind to another protein to which it is bound in a noncancerous cell. Alterations in cleavage or in protein-protein interactions may be due to over- or underproduction of a polypeptide in a cancerous cell compared to that in a normal cell, or may be due to alterations in post-translational modifications (see above) of one or more proteins in the cancerous cell. See, e.g., Henschen-Edman, Ann. N.Y. Acad. Sci. 936: 580-593 (2001).

[0224] Alterations in polypeptide post-translational modifications, as well as changes in polypeptide cleavage and protein-protein interactions, may be determined by any method known in the art. For instance, alterations in phosphorylation may be determined by using anti-phosphoserine, anti-phosphothreonine or anti-phosphotyrosine antibodies or by amino acid analysis. Glycosylation alterations may be determined using antibodies specific for different sugar residues, by carbohydrate sequencing, or by alterations in the size of the glycoprotein, which can be determined by, e.g., SDS polyacrylamide gel electrophoresis (PAGE). Other alterations of post-translational modifications, such as prenylation, racemization, methylation, acetylation and arginylation, may be determined by chemical analysis, protein sequencing, amino acid analysis, or by using antibodies specific for the particular post-translational modifications. Changes in protein-protein interactions and in polypeptide cleavage may be analyzed by any method known in the art including, without limitation, non-denaturing PAGE (for non-covalent protein-protein interactions), SDS PAGE (for covalent protein-protein interactions and protein cleavage), chemical cleavage, protein sequencing or immunoassays.

[0225] In another embodiment, the invention provides polypeptides that have been post-translationally modified. In one embodiment, polypeptides may be modified enzymatically or chemically, by addition or removal of a post-translational modification. For example, a polypeptide may be glycosylated or deglycosylated enzymatically. Similarly, polypeptides may be phosphorylated using a purified kinase, such as a MAP kinase (e.g, p38, ERK, or JNK) or a tyrosine kinase (e.g., Src or erbB2). A polypeptide may also be modified through synthetic chemistry. Alternatively, one may isolate the polypeptide of interest from a cell or tissue that expresses the polypeptide with the desired post-translational modification. In another embodiment, a nucleic acid molecule encoding the polypeptide of interest is introduced into a host cell that is capable of post-translationally modifying the encoded polypeptide in the desired fashion. If the polypeptide does not contain a motif for a desired post-translational modification, one may alter the post-translational modification by mutating the nucleic acid sequence of a nucleic acid molecule encoding the polypeptide so that it contains a site for the desired post-translational modification. Amino acid sequences that may be post-translationally modified are known in the art. See, e.g., the programs described above on the website www.expasy.org. The nucleic acid molecule may also be introduced into a host cell that is capable of post-translationally modifying the encoded polypeptide. Similarly, one may delete sites that are post-translationally modified by either mutating the nucleic acid sequence so that the encoded polypeptide does not contain the post-translational modification motif, or by introducing the native nucleic acid molecule into a host cell that is not capable of post-translationally modifying the encoded polypeptide.

[0226] It will be appreciated, as is well known and as noted above, that polypeptides are not always entirely linear. For instance, polypeptides may be branched as a result of ubiquitination, and they may be circular, with or without branching, generally as a result of posttranslation events, including natural processing event and events brought about by human manipulation which do not occur naturally. Circular, branched and branched circular polypeptides may be synthesized by non-translation natural process and by entirely synthetic methods, as well. Modifications can occur anywhere in a polypeptide, including the peptide backbone, the amino acid side-chains and the amino or carboxyl termini. In fact, blockage of the amino or carboxyl group in a polypeptide, or both, by a covalent modification, is common in naturally occurring and synthetic polypeptides and such modifications may be present in polypeptides of the present invention, as well. For instance, the amino terminal residue of polypeptides made in E. coli, prior to proteolytic processing, almost invariably will be N-formylmethionine.

[0227] Useful post-synthetic (and post-translational) modifications include conjugation to detectable labels, such as fluorophores. A wide variety of amine-reactive and thiol-reactive fluorophore derivatives have been synthesized that react under nondenaturing conditions with N-terminal amino groups and epsilon amino groups of lysine residues, on the one hand, and with free thiol groups of cysteine residues, on the other.

[0228] Kits are available commercially that permit conjugation of proteins to a variety of amine-reactive or thiol-reactive fluorophores: Molecular Probes, Inc. (Eugene, Oreg., USA), e.g., offers kits for conjugating proteins to Alexa Fluor 350, Alexa Fluor 430, Fluorescein-EX, Alexa Fluor 488, Oregon Green 488, Alexa Fluor 532, Alexa Fluor 546, Alexa Fluor 546, Alexa Fluor 568, Alexa Fluor 594, and Texas Red-X.

[0229] A wide variety of other amine-reactive and thiol-reactive fluorophores are available commercially (Molecular Probes, Inc., Eugene, Oreg., USA), including Alexa Fluor® 350, Alexa Fluor® 488, Alexa Fluor® 532, Alexa Fluor® 546, Alexa Fluor® 568, Alexa Fluor® 594, Alexa Fluor® 647 (monoclonal antibody labeling kits available from Molecular Probes, Inc., Eugene, Oreg., USA), BODIPY dyes, such as BODIPY 493/503, BODIPY FL, BODIPY R6G, BODIPY 530/550, BODIPY TMR, BODIPY 558/568, BODIPY 558/568, BODIPY 564/570, BODIPY 576/589, BODIPY 581/591, BODIPY TR, BODIPY 630/650, BODIPY 650/665, Cascade Blue, Cascade Yellow, Dansyl, lissamine rhodamine B, Marina Blue, Oregon Green 488, Oregon Green 514, Pacific Blue, rhodamine 6G, rhodamine green, rhodamine red, tetramethylrhodamine, Texas Red (available from Molecular Probes, Inc., Eugene, Oreg., USA).

[0230] The polypeptides of the present invention can also be conjugated to fluorophores, other proteins, and other macromolecules, using bifunctional linking reagents. Common homobifunctional reagents include, e.g., APG, AEDP, BASED, BMB, BMDB, BMH, BMOE, BM[PEO]3, BM[PEO]4, BS3, BSOCOES, DFDNB, DMA, DMP, DMS, DPDPB, DSG, DSP (Lomant's Reagent), DSS, DST, DTBP, DTME, DTSSP, EGS, HBVS, Sulfo-BSOCOES, Sulfo-DST, Sulfo-EGS (all available from Pierce, Rockford, Ill., USA); common heterobifunctional cross-linkers include ABH, AMAS, ANB-NOS, APDP, ASBA, BMPA, BMPH, BMPS, EDC, EMCA, EMCH, EMCS, KMUA, KMUH, GMBS, LC-SMCC, LC-SPDP, MBS, M2C2H, MPBH, MSA, NHS-ASA, PDPH, PMPI, SADP, SAED, SAND, SANPAH, SASD, SATP, SBAP, SFAD, SIA, SIAB, SMCC, SMPB, SMPH, SMPT, SPDP, Sulfo-EMCS, Sulfo-GMBS, Sulfo-HSAB, Sulfo-KMUS, Sulfo-LC-SPDP, Sulfo-MBS, Sulfo-NHS-LC-ASA, Sulfo-SADP, Sulfo-SANPAH, Sulfo-SIAB, Sulfo-SMCC, Sulfo-SMPB, Sulfo-LC-SMPT, SVSB, TFCS (all available Pierce, Rockford, Ill., USA).

[0231] Polypeptides of the present invention, including full length polypeptides, fragments and fusion proteins, can be conjugated, using such cross-linking reagents, to fluorophores that are not amine- or thiol-reactive. Other labels that usefully can be conjugated to polypeptides of the present invention include radioactive labels, echosonographic contrast reagents, and MRI contrast agents.

[0232] Polypeptides of the present invention, including full length polypeptide, fragments and fusion proteins, can also usefully be conjugated using cross-linking agents to carrier proteins, such as KLH, bovine thyroglobulin, and even bovine serum albumin (BSA), to increase immunogenicity for raising anti-HSP antibodies.

[0233] Polypeptides of the present invention, including full length polypeptide, fragments and fusion proteins, can also usefully be conjugated to polyethylene glycol (PEG); PEGylation increases the serum half life of proteins administered intravenously for replacement therapy. Delgado et al., Crit. Rev. Ther. Drug Carrier Syst. 9(3-4): 249-304 (1992); Scott et al., Curr. Pharm. Des. 4(6): 423-38 (1998); DeSantis et al., Curr. Opin. Biotechnol. 10(4): 324-30 (1999). PEG monomers can be attached to the protein directly or through a linker, with PEGylation using PEG monomers activated with tresyl chloride (2,2,2-trifluoroethanesulphonyl chloride) permitting direct attachment under mild conditions.

[0234] Polypeptides of the present invention are also inclusive of analogs of a polypeptide encoded by a nucleic acid molecule according to the instant invention. In a preferred embodiment, this polypeptide is a HSP. In a more preferred embodiment, this polypeptide is derived from a polypeptide having part or all of the amino acid sequence of SEQ ID NO: 410-611. Also preferred is an analog polypeptide comprising one or more substitutions of non-natural amino acids or non-native inter-residue bonds compared to the naturally occurring polypeptide. In one embodiment, the analog is structurally similar to a HSP, but one or more peptide linkages is replaced by a linkage selected from the group consisting of —CH₂NH—, —CH₂S—, —CH₂—CH₂—, —CH═CH—(cis and trans), —COCH₂—, —CH(OH)CH₂—and —CH₂SO—. In another embodiment, the analog comprises substitution of one or more amino acids of a HSP with a D-amino acid of the same type or other non-natural amino acid in order to generate more stable peptides. D-amino acids can readily be incorporated during chemical peptide synthesis: peptides assembled from D-amino acids are more resistant to proteolytic attack; incorporation of D-amino acids can also be used to confer specific three-dimensional conformations on the peptide. Other amino acid analogues commonly added during chemical synthesis include ornithine, norleucine, phosphorylated amino acids (typically phosphoserine, phosphothreonine, phosphotyrosine), L-malonyltyrosine, a non-hydrolyzable analog of phosphotyrosine (see, e.g., Kole et al., Biochem. Biophys. Res. Com. 209: 817-821 (1995)), and various halogenated phenylalanine derivatives.

[0235] Non-natural amino acids can be incorporated during solid phase chemical synthesis or by recombinant techniques, although the former is typically more common. Solid phase chemical synthesis of peptides is well established in the art. Procedures are described, inter alia, in Chan et al. (eds.), Fmoc Solid Phase Peptide Synthesis: A Practical Approach (Practical Approach Series), Oxford Univ. Press (March 2000); Jones, Amino Acid and Peptide Synthesis (Oxford Chemistry Primers, No 7), Oxford Univ. Press (1992); and Bodanszky, Principles of Peptide Synthesis (Springer Laboratory), Springer Verlag (1993).

[0236] Amino acid analogues having detectable labels are also usefully incorporated during synthesis to provide derivatives and analogs. Biotin, for example can be added using biotinoyl-(9-fluorenyhmethoxycarbonyl)-L-lysine (FMOC biocytin) (Molecular Probes, Eugene, Oreg., USA). Biotin can also be added enzymatically by incorporation into a fusion protein of a E. coli BirA substrate peptide. The FMOC and tBOC derivatives of dabcyl-L-lysine (Molecular Probes, Inc., Eugene, Oreg., USA) can be used to incorporate the dabcyl chromophore at selected sites in the peptide sequence during synthesis. The aminonaphthalene derivative EDANS, the most common fluorophore for pairing with the dabcyl quencher in fluorescence resonance energy transfer (FRET) systems, can be introduced during automated synthesis of peptides by using EDANS-FMOC-L-glutamic acid or the corresponding tBOC derivative (both from Molecular Probes, Inc., Eugene, Oreg., USA). Tetramethylrhodamine fluorophores can be incorporated during automated FMOC synthesis of peptides using (FMOC)-TMR-L-lysine (Molecular Probes, Inc. Eugene, Oreg., USA).

[0237] Other useful amino acid analogues that can be incorporated during chemical synthesis include aspartic acid, glutamic acid, lysine, and tyrosine analogues having allyl side-chain protection (Applied Biosystems, Inc., Foster City, Calif., USA); the allyl side chain permits synthesis of cyclic, branched-chain, sulfonated, glycosylated, and phosphorylated peptides.

[0238] A large number of other FMOC-protected non-natural amino acid analogues capable of incorporation during chemical synthesis are available commercially, including, e.g., Fmoc-2-aminobicyclo[2.2.1]heptane-2-carboxylic acid, Fmoc-3-endo-aminobicyclo[2.2.1]heptane-2-endo-carboxylic acid, Fmoc-3-exo-aminobicyclo[2.2.1]heptane-2-exo-carboxylic acid, Fmoc-3-endo-amino-bicyclo[2.2.1]hept-5-ene-2-endo-carboxylic acid, Fmoc-3-exo-amino-bicyclo[2.2.1]hept-5-ene-2-exo-carboxylic acid, Fmoc-cis-2-amino-1-cyclohexanecarboxylic acid, Fmoc-trans-2-amino-1-cyclohexanecarboxylic acid, Fmoc-1-amino-1-cyclopentanecarboxylic acid, Fmoc-cis-2-amino-1-cyclopentanecarboxylic acid, Fmoc-1-amino-1-cyclopropanecarboxylic acid, Fmoc-D-2-amino-4-(ethylthio)butyric acid, Fmoc-L-2-amino-4-(ethylthio)butyric acid, Fmoc-L-buthionine, Fmoc-5-methyl-L-Cysteine, Fmoc-2-aminobenzoic acid (anthranillic acid), Fmoc-3-aminobenzoic acid, Fmoc-4-aminobenzoic acid, Fmoc-2-aminobenzophenone-2′-carboxylic acid, Fmoc-N-(4-aminobenzoyl)-β-alanine, Fmoc-2-amino-4,5-dimethoxybenzoic acid, Fmoc-4-aminohippuric acid, Fmoc-2-amino-3-hydroxybenzoic acid, Fmoc-2-amino-5-hydroxybenzoic acid, Fmoc-3-amino-4-hydroxybenzoic acid, Fmoc-4-amino-3-hydroxybenzoic acid, Fmoc-4-amino-2-hydroxybenzoic acid, Fmoc-5-amino-2-hydroxybenzoic acid, Fmoc-2-amino-3-methoxybenzoic acid, Fmoc-4-amino-3-methoxybenzoic acid, Fmoc-2-amino-3-methylbenzoic acid, Fmoc-2-amino-5-methylbenzoic acid, Fmoc-2-amino-6-methylbenzoic acid, Fmoc-3-amino-2-methylbenzoic acid, Fmoc-3-amino-4-methylbenzoic acid, Fmoc-4-amino-3-methylbenzoic acid, Fmoc-3-amino-2-naphtoic acid, Fmoc-D,L-3-amino-3-phenylpropionic acid, Fmoc-L-Methyldopa, Fmoc-2-amino-4,6-dimethyl-3-pyridinecarboxylic acid, Fmoc-D,L-amino-2-thiophenacetic acid, Fmoc-4-(carboxymethyl)piperazine, Fmoc-4-carboxypiperazine, Fmoc-4-(carboxymethyl)homopiperazine, Fmoc-4-phenyl-4-piperidinecarboxylic acid, Fmoc-L-1,2,3,4-tetrahydronorharman-3-carboxylic acid, Fmoc-L-thiazolidine-4-carboxylic acid, all available from The Peptide Laboratory (Richmond, Calif., USA).

[0239] Non-natural residues can also be added biosynthetically by engineering a suppressor tRNA, typically one that recognizes the UAG stop codon, by chemical aminoacylation with the desired unnatural amino acid. Conventional site-directed mutagenesis is used to introduce the chosen stop codon UAG at the site of interest in the protein gene. When the acylated suppressor tRNA and the mutant gene are combined in an in vitro transcription/translation system, the unnatural amino acid is incorporated in response to the UAG codon to give a protein containing that amino acid at the specified position. Liu et al., Proc. Natl Acad. Sci. USA 96(9): 4780-5 (1999); Wang et al., Science 292(5516): 498-500 (2001).

[0240] Fusion Proteins

[0241] Another aspect of the present invention relates to the fusion of a polypeptide of the present invention to heterologous polypeptides. In a preferred embodiment, the polypeptide of the present invention is a HSP. In a more preferred embodiment, the polypeptide of the present invention that is fused to a heterologous polypeptide comprises part or all of the amino acid sequence of SEQ ID NO: 410-611, or is a mutein, homologous polypeptide, analog or derivative thereof. In an even more preferred embodiment, the fusion protein is encoded by a nucleic acid molecule comprising all or part of the nucleic acid sequence of SEQ ID NO: 1-409, or comprises all or part of a nucleic acid sequence that selectively hybridizes or is homologous to a nucleic acid molecule comprising a nucleic acid sequence of SEQ ID NO: 1-409.

[0242] The fusion proteins of the present invention will include at least one fragment of a polypeptide of the present invention, which fragment is at least 6, typically at least 8, often at least 15, and usefully at least 16, 17, 18, 19, or 20 amino acids long. The fragment of the polypeptide of the present to be included in the fusion can usefully be at least 25 amino acids long, at least 50 amino acids long, and can be at least 75, 100, or even 150 amino acids long. Fusions that include the entirety of a polypeptide of the present invention have particular utility.

[0243] The heterologous polypeptide included within the fusion protein of the present invention is at least 6 amino acids in length, often at least 8 amino acids in length, and preferably at least 15, 20, or 25 amino acids in length. Fusions that include larger polypeptides, such as the IgG Fc region, and even entire proteins (such as GFP chromophore-containing proteins) are particularly useful.

[0244] As described above in the description of vectors and expression vectors of the present invention, which discussion is incorporated here by reference in its entirety, heterologous polypeptides to be included in the fusion proteins of the present invention can usefully include those designed to facilitate purification and/or visualization of recombinantly-expressed proteins. See, e.g., Ausubel, Chapter 16, (1992), supra. Although purification tags can also be incorporated into fusions that are chemically synthesized, chemical synthesis typically provides sufficient purity that further purification by HPLC suffices; however, visualization tags as above described retain their utility even when the protein is produced by chemical synthesis, and when so included render the fusion proteins of the present invention useful as directly detectable markers of the presence of a polypeptide of the invention.

[0245] As also discussed above, heterologous polypeptides to be included in the fusion proteins of the present invention can usefully include those that facilitate secretion of recombinantly expressed proteins into the periplasmic space or extracellular milieu for prokaryotic hosts or into the culture medium for eukaryotic cells through incorporation of secretion signals and/or leader sequences. For example, a His⁶ tagged protein can be purified on a Ni affinity column and a GST fusion protein can be purified on a glutathione affinity column. Similarly, a fusion protein comprising the Fc domain of IgG can be purified on a Protein A or Protein G column and a fusion protein comprising an epitope tag such as myc can be purified using an immunoaffinity column containing an anti-c-myc antibody. It is preferable that the epitope tag be separated from the protein encoded by the essential gene by an enzymatic cleavage site that can be cleaved after purification. See also the discussion of nucleic acid molecules encoding fusion proteins that may be expressed on the surface of a cell.

[0246] Other useful fusion proteins of the present invention include those that permit use of the polypeptide of the present invention as bait in a yeast two-hybrid system. See Bartel et al. (eds.), The Yeast Two-Hybrid System, Oxford University Press (1997); Zhu et al., Yeast Hybrid Technologies, Eaton Publishing (2000); Fields et al., Trends Genet. 10(8): 286-92 (1994); Mendelsohn et al., Curr. Opin. Biotechnol. 5(5): 482-6 (1994); Luban et al., Curr. Opin. Biotechnol. 6(1): 59-64 (1995); Allen et al., Trends Biochem. Sci. 20(12): 511-6 (1995); Drees, Curr. Opin. Chem. Biol. 3(1): 64-70 (1999); Topcu et al., Pharm. Res. 17(9): 1049-55 (2000); Fashena et al., Gene 250(1-2): 1-14 (2000); Colas et al., Nature 380, 548-550 (1996); Norman, T. et al., Science 285, 591-595 (1999); Fabbrizio et al., Oncogene 18, 4357-4363 (1999); Xu et al., Proc Natl Acad Sci USA. 94, 12473-12478 (1997); Yang, et al., Nuc. Acids Res. 23, 1152-1156 (1995); Kolonin et al., Proc Natl Acad Sci USA 95, 14266-14271 (1998); Cohen et al., Proc Natl Acad Sci USA 95, 14272-14277 (1998); Uetz, et al. Nature 403, 623-627(2000); Ito, et al., Proc Natl Acad Sci USA 98, 4569-4574 (2001). Typically, such fusion is to either E. coli LexA or yeast GAL4 DNA binding domains. Related bait plasmids are available that express the bait fused to a nuclear localization signal.

[0247] Other useful fusion proteins include those that permit display of the encoded polypeptide on the surface of a phage or cell, fusions to intrinsically fluorescent proteins, such as green fluorescent protein (GFP), and fusions to the IgG Fc region, as described above.

[0248] The polypeptides of the present invention can also usefully be fused to protein toxins, such as Pseudomonas exotoxin A, diphtheria toxin, shiga toxin A, anthrax toxin lethal factor, ricin, in order to effect ablation of cells that bind or take up the proteins of the present invention.

[0249] Fusion partners include, inter alia, myc, hemagglutinin (HA), GST, immunoglobulins, β-galactosidase, biotin trpE, protein A, β-lactamase, α-amylase, maltose binding protein, alcohol dehydrogenase, polyhistidine (for example, six histidine at the amino and/or carboxyl terminus of the polypeptide), lacZ, green fluorescent protein (GFP), yeast α mating factor, GAL4 transcription activation or DNA binding domain, luciferase, and serum proteins such as ovalbumin, albumin and the constant domain of IgG. See, e.g., Ausubel (1992), supra and Ausubel (1999), supra. Fusion proteins may also contain sites for specific enzymatic cleavage, such as a site that is recognized by enzymes such as Factor XIII, trypsin, pepsin, or any other enzyme known in the art. Fusion proteins will typically be made by either recombinant nucleic acid methods, as described above, chemically synthesized using techniques well known in the art (e.g., a Merrifield synthesis), or produced by chemical cross-linking.

[0250] Another advantage of fusion proteins is that the epitope tag can be used to bind the fusion protein to a plate or column through an affinity linkage for screening binding proteins or other molecules that bind to the HSP.

[0251] As further described below, the polypeptides of the present invention can readily be used as specific immunogens to raise antibodies that specifically recognize polypeptides of the present invention including HSPs and their allelic variants and homologues. The antibodies, in turn, can be used, inter alia, specifically to assay for the polypeptides of the present invention, particularly HSPs, e.g. by ELISA for detection of protein fluid samples, such as serum, by immunohistochemistry or laser scanning cytometry, for detection of protein in tissue samples, or by flow cytometry, for detection of intracellular protein in cell suspensions, for specific antibody-mediated isolation and/or purification of HSPs, as for example by immunoprecipitation, and for use as specific agonists or antagonists of HSPs.

[0252] One may determine whether polypeptides of the present invention including HSPs, muteins, homologous proteins or allelic variants or fusion proteins of the present invention are functional by methods known in the art. For instance, residues that are tolerant of change while retaining function can be identified by altering the polypeptide at known residues using methods known in the art, such as alanine scanning mutagenesis, Cunningham et al., Science 244(4908): 1081-5 (1989); transposon linker scanning mutagenesis, Chen et al., Gene 263(1-2): 39-48 (2001); combinations of homolog- and alanine-scanning mutagenesis, Jin et al., J. Mol. Biol. 226(3): 851-65 (1992); combinatorial alanine scanning, Weiss et al., Proc. Natl. Acad. Sci USA 97(16): 89504 (2000), followed by functional assay. Transposon linker scanning kits are available commercially (New England Biolabs, Beverly, Mass., USA, catalog. no. E7-102S; EZ::TN™ In-Frame Linker Insertion Kit, catalogue no. EZI04KN, (Epicentre Technologies Corporation, Madison, Wis., USA).

[0253] Purification of the polypeptides or fusion proteins of the present invention is well known and within the skill of one having ordinary skill in the art. See, e.g. Scopes, Protein Purification, 2d ed. (1987). Purification of recombinantly expressed polypeptides is described above. Purification of chemically-synthesized peptides can readily be effected, e.g., by HPLC.

[0254] Accordingly, it is an aspect of the present invention to provide the isolated polypeptides or fusion proteins of the present invention in pure or substantially pure form in the presence of absence of a stabilizing agent. Stabilizing agents include both proteinaceous and non-proteinaceous material and are well known in the art. Stabilizing agents, such as albumin and polyethylene glycol (PEG) are known and are commercially available.

[0255] Although high levels of purity are preferred when the isolated polypeptide or fusion protein of the present invention are used as therapeutic agents, such as in vaccines and replacement therapy, the isolated polypeptides of the present invention are also useful at lower purity. For example, partially purified polypeptides of the present invention can be used as immunogens to raise antibodies in laboratory animals.

[0256] In a preferred embodiment, the purified and substantially purified polypeptides of the present invention are in compositions that lack detectable ampholytes, acrylamide monomers, bis-acrylamide monomers, and polyacrylamide.

[0257] The polypeptides or fusion proteins of the present invention can usefully be attached to a substrate. The substrate can be porous or solid, planar or non-planar; the bond can be covalent or noncovalent. For example, the peptides of the invention may be stabilized by covalent linkage to albumin. See, U.S. Pat. No. 5,876,969, the contents of which are hereby incorporated in its entirety.

[0258] For example, the polypeptides or fusion proteins of the present invention can usefully be bound to a porous substrate, commonly a membrane, typically comprising nitrocellulose, polyvinylidene fluoride (PVDF), or cationically derivatized, hydrophilic PVDF; so bound, the polypeptides or fusion proteins of the present invention can be used to detect and quantify antibodies, e.g. in serum, that bind specifically to the immobilized polypeptide or fusion protein of the present invention.

[0259] As another example, the polypeptides or fusion proteins of the present invention can usefully be bound to a substantially nonporous substrate, such as plastic, to detect and quantify antibodies, e.g. in serum, that bind specifically to the immobilized protein of the present invention. Such plastics include polymethylacrylic, polyethylene, polypropylene, polyacrylate, polymethylmethacrylate, polyvinylchloride, polytetrafluoroethylene, polystyrene, polycarbonate, polyacetal, polysulfone, celluloseacetate, cellulosenitrate, nitrocellulose, or mixtures thereof; when the assay is performed in a standard microtiter dish, the plastic is typically polystyrene.

[0260] The polypeptides and fusion proteins of the present invention can also be attached to a substrate suitable for use as a surface enhanced laser desorption ionization source; so attached, the polypeptide or fusion protein of the present invention is useful for binding and then detecting secondary proteins that bind with sufficient affinity or avidity to the surface-bound polypeptide or fusion protein to indicate biologic interaction there between. The polypeptides or fusion proteins of the present invention can also be attached to a substrate suitable for use in surface plasmon resonance detection; so attached, the polypeptide or fusion protein of the present invention is useful for binding and then detecting secondary proteins that bind with sufficient affinity or avidity to the surface-bound polypeptide or fusion protein to indicate biological interaction there between.

Antibodies

[0261] In another aspect, the invention provides antibodies, including fragments and derivatives thereof, that bind specifically to polypeptides encoded by the nucleic acid molecules of the invention. In a preferred embodiment, the antibodies are specific for a polypeptide that is a HSP, or a fragment, mutein, derivative, analog or fusion protein thereof. In a more preferred embodiment, the antibodies are specific for a polypeptide that comprises SEQ ID NO: 410-611, or a fragment, mutein, derivative, analog or fusion protein thereof.

[0262] The antibodies of the present invention can be specific for linear epitopes, discontinuous epitopes, or conformational epitopes of such proteins or protein fragments, either as present on the protein in its native conformation or, in some cases, as present on the proteins as denatured, as, e.g., by solubilization in SDS. New epitopes may be also due to a difference in post translational modifications (PTMs) in disease versus normal tissue. For example, a particular site on a HSP may be glycosylated in cancerous cells, but not glycosylated in normal cells or vis versa. In addition, alternative splice forms of a HSP may be indicative of cancer. Differential degradation of the C or N-terminus of a HSP may also be a marker or target for anticancer therapy. For example, an HSP may be N-terminal degraded in cancer cells exposing new epitopes to which antibodies may selectively bind for diagnostic or therapeutic uses.

[0263] As is well known in the art, the degree to which an antibody can discriminate as among molecular species in a mixture will depend, in part, upon the conformational relatedness of the species in the mixture; typically, the antibodies of the present invention will discriminate over adventitious binding to non-HSP polypeptides by at least two-fold, more typically by at least 5-fold, typically by more than 10-fold, 25-fold, 50-fold, 75-fold, and often by more than 100-fold, and on occasion by more than 500-fold or 1000-fold. When used to detect the proteins or protein fragments of the present invention, the antibody of the present invention is sufficiently specific when it can be used to determine the presence of the polypeptide of the present invention in samples derived from human hepatic.

[0264] Typically, the affinity or avidity of an antibody (or antibody multimer, as in the case of an IgM pentamer) of the present invention for a protein or protein fragment of the present invention will be at least about 1×10⁻⁶ molar (M), typically at least about 5×10⁻⁷ M, 1×10⁻⁷ M, with affinities and avidities of at least 1×10⁻⁸ M, 5×10⁻⁹ M, 1×10⁻¹⁰ M and up to 1×10⁻¹³ M proving especially useful.

[0265] The antibodies of the present invention can be naturally occurring forms, such as IgG, IgM, IgD, IgE, IgY, and IgA, from any avian, reptilian, or mammalian species.

[0266] Human antibodies can, but will infrequently, be drawn directly from human donors or human cells. In such case, antibodies to the polypeptides of the present invention will typically have resulted from fortuitous immunization, such as autoimmune immunization, with the polypeptide of the present invention. Such antibodies will typically, but will not invariably, be polyclonal. In addition, individual polyclonal antibodies may be isolated and cloned to generate monoclonals.

[0267] Human antibodies are more frequently obtained using transgenic animals that express human immunoglobulin genes, which transgenic animals can be affirmatively immunized with the protein immunogen of the present invention. Human Ig-transgenic mice capable of producing human antibodies and methods of producing human antibodies therefrom upon specific immunization are described, inter alia, in U.S. Pat. Nos. 6,162,963; 6,150,584; 6,114,598; 6,075,181; 5,939,598; 5,877,397; 5,874,299; 5,814,318; 5,789,650; 5,770,429; 5,661,016; 5,633,425; 5,625,126; 5,569,825; 5,545,807; 5,545,806, and 5,591,669, the disclosures of which are incorporated herein by reference in their entireties. Such antibodies are typically monoclonal, and are typically produced using techniques developed for production of murine antibodies.

[0268] Human antibodies are particularly useful, and often preferred, when the antibodies of the present invention are to be administered to human beings as in vivo diagnostic or therapeutic agents, since recipient immune response to the administered antibody will often be substantially less than that occasioned by administration of an antibody derived from another species, such as mouse.

[0269] IgG, IgM, IgD, IgE, IgY, and IgA antibodies of the present invention are also usefully obtained from other species, including mammals such as rodents (typically mouse, but also rat, guinea pig, and hamster), lagomorphs (typically rabbits), and also larger mammals, such as sheep, goats, cows, and horses; or egg laying birds or reptiles such as chickens or alligators. In such cases, as with the transgenic human-antibody-producing non-human mammals, fortuitous immunization is not required, and the non-human mammal is typically affirmatively immunized, according to standard immunization protocols, with the polypeptide of the present invention. One form of avian antibodies may be generated using techniques described in WO 00/29444, published 25 May 2000.

[0270] As discussed above, virtually all fragments of 8 or more contiguous amino acids of a polypeptide of the present invention can be used effectively as immunogens when conjugated to a carrier, typically a protein such as bovine thyroglobulin, keyhole limpet hemocyanin, or bovine serum albumin, conveniently using a bifunctional linker such as those described elsewhere above, which discussion is incorporated by reference here.

[0271] Immunogenicity can also be conferred by fusion of the polypeptide of the present invention to other moieties. For example, polypeptides of the present invention can be produced by solid phase synthesis on a branched polylysine core matrix; these multiple antigenic peptides (MAPs) provide high purity, increased avidity, accurate chemical definition and improved safety in vaccine development. Tam et al., Proc. Natl. Acad. Sci. USA 85: 5409-5413 (1988); Posnett et al., J. Biol. Chem. 263: 1719-1725 (1988).

[0272] Protocols for immunizing non-human mammals or avian species are well-established in the art. See Harlow et al. (eds.), Using Antibodies: A Laboratory Manual, Cold Spring Harbor Laboratory (1998); Coligan et al. (eds.), Current Protocols in Immunology, John Wiley & Sons, Inc. (2001); Zola, Monoclonal Antibodies: Preparation and Use of Monoclonal Antibodies and Engineered Antibody Derivatives (Basics: From Background to Bench), Springer Verlag (2000); Gross M, Speck J. Dtsch. Tierarztl. Wochenschr. 103: 417-422 (1996). Immunization protocols often include multiple immunizations, either with or without adjuvants such as Freund's complete adjuvant and Freund's incomplete adjuvant, and may include naked DNA immunization (Moss, Semin. Immunol. 2: 317-327 (1990).

[0273] Antibodies from non-human mammals and avian species can be polyclonal or monoclonal, with polyclonal antibodies having certain advantages in immunohistochemical detection of the polypeptides of the present invention and monoclonal antibodies having advantages in identifying and distinguishing particular epitopes of the polypeptides of the present invention. Antibodies from avian species may have particular advantage in detection of the polypeptides of the present invention, in human serum or tissues (Vikinge et al., Biosens. Bioelectron. 13: 1257-1262 (1998). Following immunization, the antibodies of the present invention can be obtained using any art-accepted technique. Such techniques are well known in the art and are described in detail in references such as Coligan, supra; Zola, supra; Howard et al. (eds.), Basic Methods in Antibody Production and Characterization, CRC Press (2000); Harlow, supra; Davis (ed.), Monoclonal Antibody Protocols, Vol. 45, Humana Press (1995); Delves (ed.), Antibody Production: Essential Techniques, John Wiley & Son Ltd (1997); and Kenney, Antibody Solution: An Antibody Methods Manual, Chapman & Hall (1997).

[0274] Briefly, such techniques include, inter alia, production of monoclonal antibodies by hybridomas and expression of antibodies or fragments or derivatives thereof from host cells engineered to express immunoglobulin genes or fragments thereof. These two methods of production are not mutually exclusive: genes encoding antibodies specific for the polypeptides of the present invention can be cloned from hybridomas and thereafter expressed in other host cells. Nor need the two necessarily be performed together: e.g., genes encoding antibodies specific for the polypeptides of the present invention can be cloned directly from B cells known to be specific for the desired protein, as further described in U.S. Pat. No. 5,627,052, the disclosure of which is incorporated herein by reference in its entirety, or from antibody-displaying phage.

[0275] Recombinant expression in host cells is particularly useful when fragments or derivatives of the antibodies of the present invention are desired.

[0276] Host cells for recombinant antibody production of whole antibodies, antibody fragments, or antibody derivatives can be prokaryotic or eukaryotic.

[0277] Prokaryotic hosts are particularly useful for producing phage displayed antibodies of the present invention.

[0278] The technology of phage-displayed antibodies, in which antibody variable region fragments are fused, for example, to the gene III protein (pIII) or gene VIII protein (pVIII) for display on the surface of filamentous phage, such as M13, is by now well-established. See, e.g., Sidhu, Curr. Opin. Biotechnol. 11(6): 610-6 (2000); Griffiths et al., Curr. Opin. Biotechnol. 9(1): 102-8 (1998); Hoogenboom et al., Immunotechnology, 4(1): 1-20 (1998); Rader et al., Current Opinion in Biotechnology 8: 503-508 (1997); Aujame et al., Human Antibodies 8: 155-168 (1997); Hoogenboom, Trends in Biotechnol. 15: 62-70 (1997); de Kruif et al., 17: 453-455 (1996); Barbas et al., Trends in Biotechnol. 14: 230-234 (1996); Winter et al., Ann. Rev. Immunol. 433-455 (1994). Techniques and protocols required to generate, propagate, screen (pan), and use the antibody fragments from such libraries have recently been compiled. See, e.g., Barbas (2001), supra; Kay, supra; and Abelson, supra.

[0279] Typically, phage-displayed antibody fragments are scFv fragments or Fab fragments; when desired, full length antibodies can be produced by cloning the variable regions from the displaying phage into a complete antibody and expressing the full length antibody in a further prokaryotic or a eukaryotic host cell. Eukaryotic cells are also useful for expression of the antibodies, antibody fragments, and antibody derivatives of the present invention. For example, antibody fragments of the present invention can be produced in Pichia pastoris and in Saccharomyces cerevisiae. See, e.g., Takahashi et al., Biosci. Biotechnol. Biochem. 64(10): 2138-44 (2000); Freyre et al., J. Biotechnol. 76(2-3):1 57-63 (2000); Fischer et al., Biotechnol. Appl. Biochem. 30 (Pt 2): 117-20 (1999); Pennell et al., Res. Immunol. 149(6): 599-603 (1998); Eldin et al., J. Immunol. Methods. 201(1): 67-75 (1997); Frenken et al., Res. Immunol. 149(6): 589-99 (1998); and Shusta et al., Nature Biotechnol. 16(8): 773-7 (1998).

[0280] Antibodies, including antibody fragments and derivatives, of the present invention can also be produced in insect cells. See, e.g., Li et al., Protein Expr. Purif. 21(1): 121-8 (2001); Ailor et al., Biotechnol. Bioeng. 58(2-3): 196-203 (1998); Hsu et al., Biotechnol. Prog. 13(1): 96-104 (1997); Edelman et al., Immunology 91(1): 13-9 (1997); and Nesbit et al., J. Immunol. Methods 151(1-2): 201-8 (1992).

[0281] Antibodies and fragments and derivatives thereof of the present invention can also be produced in plant cells, particularly maize or tobacco, Giddings et al., Nature Biotechnol. 18(11): 1151-5 (2000); Gavilondo et al., Biotechniques 29(1): 128-38 (2000); Fischer et al., J. Biol. Regul. Homeost. Agents 14(2): 83-92 (2000); Fischer et al., Biotechnol. Appl. Biochem. 30 (Pt 2): 113-6 (1999); Fischer et al., Biol. Chem. 380(7-8): 825-39 (1999); Russell, Curr. Top. Microbiol. Immunol. 240: 119-38 (1999); and Ma et al., Plant Physiol. 109(2): 341-6 (1995).

[0282] Antibodies, including antibody fragments and derivatives, of the present invention can also be produced in transgenic, non-human, mammalian milk. See, e.g. Pollock et al., J. Immunol Methods. 231: 147-57 (1999); Young et al., Res. Immunol. 149: 609-10 (1998); and Limonta et al., Immunotechnology 1: 107-13 (1995).

[0283] Mammalian cells useful for recombinant expression of antibodies, antibody fragments, and antibody derivatives of the present invention include CHO cells, COS cells, 293 cells, and myeloma cells. Verma et al., J. Immunol. Methods 216(1-2):165-81 (1998) review and compare bacterial, yeast, insect and mammalian expression systems for expression of antibodies. Antibodies of the present invention can also be prepared by cell free translation, as further described in Merk et al., J. Biochem. (Tokyo) 125(2): 328-33 (1999) and Ryabova et al., Nature Biotechnol. 15(1): 79-84 (1997), and in the milk of transgenic animals, as further described in Pollock et al., J. Immunol. Methods 231(1-2): 147-57 (1999).

[0284] The invention further provides antibody fragments that bind specifically to one or more of the polypeptides of the present invention, to one or more of the polypeptides encoded by the isolated nucleic acid molecules of the present invention, or the binding of which can be competitively inhibited by one or more of the polypeptides of the present invention or one or more of the polypeptides encoded by the isolated nucleic acid molecules of the present invention. Among such useful fragments are Fab, Fab′, Fv, F(ab)′₂, and single chain Fv (scFv) fragments. Other useful fragments are described in Hudson, Curr. Opin. Biotechnol. 9(4): 395-402 (1998).

[0285] The present invention also relates to antibody derivatives that bind specifically to one or more of the polypeptides of the present invention, to one or more of the polypeptides encoded by the isolated nucleic acid molecules of the present invention, or the binding of which can be competitively inhibited by one or more of the polypeptides of the present invention or one or more of the polypeptides encoded by the isolated nucleic acid molecules of the present invention.

[0286] Among such useful derivatives are chimeric, primatized, and humanized antibodies; such derivatives are less immunogenic in human beings, and thus are more suitable for in vivo administration, than are unmodified antibodies from non-human mammalian species. Another useful method is PEGylation to increase the serum half life of the antibodies.

[0287] Chimeric antibodies typically include heavy and/or light chain variable regions (including both CDR and framework residues) of immunoglobulins of one species, typically mouse, fused to constant regions of another species, typically human. See, e.g., Morrison et al., Proc. Natl. Acad. Sci USA. 81(21): 6851-5 (1984); Sharon et al., Nature 309(5966): 364-7 (1984); Takeda et al., Nature 314(6010): 452-4 (1985); and U.S. Pat. No. 5,807,715 the disclosure of which is incorporated herein by reference in its entirety. Primatized and humanized antibodies typically include heavy and/or light chain CDRs from a murine antibody grafted into a non-human primate or human antibody V region framework, usually further comprising a human constant region, Riechmann et al., Nature 332(6162): 323-7 (1988); Co et al., Nature 351(6326): 501-2 (1991); and U.S. Pat. Nos. 6,054,297; 5,821,337; 5,770,196; 5,766,886; 5,821,123; 5,869,619; 6,180,377; 6,013,256; 5,693,761; and 6,180,370, the disclosures of which are incorporated herein by reference in their entireties. Other useful antibody derivatives of the invention include heteromeric antibody complexes and antibody fusions, such as diabodies (bispecific antibodies), single-chain diabodies, and intrabodies.

[0288] It is contemplated that the nucleic acids encoding the antibodies of the present invention can be operably joined to other nucleic acids forming a recombinant vector for cloning or for expression of the antibodies of the invention. Accordingly, the present invention includes any recombinant vector containing the coding sequences, or part thereof, whether for eukaryotic transduction, transfection or gene therapy. Such vectors may be prepared using conventional molecular biology techniques, known to those with skill in the art, and would comprise DNA encoding sequences for the immunoglobulin V-regions including framework and CDRs or parts thereof, and a suitable promoter either with or without a signal sequence for intracellular transport. Such vectors may be transduced or transfected into eukaryotic cells or used for gene therapy (Marasco et al., Proc. Natl. Acad. Sci. (USA) 90: 7889-7893 (1993); Duan et al., Proc. Natl. Acad. Sci. (USA) 91: 5075-5079 (1994), by conventional techniques, known to those with skill in the art.

[0289] The antibodies of the present invention, including fragments and derivatives thereof, can usefully be labeled. It is, therefore, another aspect of the present invention to provide labeled antibodies that bind specifically to one or more of the polypeptides of the present invention, to one or more of the polypeptides encoded by the isolated nucleic acid molecules of the present invention, or the binding of which can be competitively inhibited by one or more of the polypeptides of the present invention or one or more of the polypeptides encoded by the isolated nucleic acid molecules of the present invention. The choice of label depends, in part, upon the desired use.

[0290] For example, when the antibodies of the present invention are used for immunohistochemical staining of tissue samples, the label can usefully be an enzyme that catalyzes production and local deposition of a detectable product. Enzymes typically conjugated to antibodies to permit their immunohistochemical visualization are well known, and include alkaline phosphatase, β-galactosidase, glucose oxidase, horseradish peroxidase (HRP), and urease. Typical substrates for production and deposition of visually detectable products include o-nitrophenyl-beta-D-galactopyranoside (ONPG); o-phenylenediamine dihydrochloride (OPD); p-nitrophenyl phosphate (PNPP); p-nitrophenyl-beta-D-galactopryanoside (PNPG); 3′,3′-diaminobenzidine (DAB); 3-amino-9-ethylcarbazole (AEC); 4-chloro-1-naphthol (CN); 5-bromo-4-chloro-3-indolyl-phosphate (BCIP); ABTS®; BluoGal; iodonitrotetrazolium (INT); nitroblue tetrazolium chloride (NBT); phenazine methosulfate (PMS); phenolphthalein monophosphate (PMP); tetramethyl benzidine (TMB); tetranitroblue tetrazolium (TNBT); X-Gal; X-Gluc; and X-Glucoside.

[0291] Other substrates can be used to produce products for local deposition that are luminescent. For example, in the presence of hydrogen peroxide (H₂O₂), horseradish peroxidase (HRP) can catalyze the oxidation of cyclic diacylhydrazides, such as luminol. Immediately following the oxidation, the luminol is in an excited state (intermediate reaction product), which decays to the ground state by emitting light. Strong enhancement of the light emission is produced by enhancers, such as phenolic compounds. Advantages include high sensitivity, high resolution, and rapid detection without radioactivity and requiring only small amounts of antibody. See, e.g., Thorpe et al., Methods Enzymol. 133: 331-53 (1986); Kricka et al., J. Immunoassay 17(1): 67-83 (1996); and Lundqvist et al., J. Biolumin. Chemilumin. 10(6): 353-9 (1995). Kits for such enhanced chemiluminescent detection (ECL) are available commercially. The antibodies can also be labeled using colloidal gold.

[0292] As another example, when the antibodies of the present invention are used, e.g., for flow cytometric detection, for scanning laser cytometric detection, or for fluorescent imununoassay, they can usefully be labeled with fluorophores. There are a wide variety of fluorophore labels that can usefully be attached to the antibodies of the present invention. For flow cytometric applications, both for extracellular detection and for intracellular detection, common useful fluorophores can be fluorescein isothiocyanate (FITC), allophycocyanin (APC), R-phycoerythrin (PE), peridinin chlorophyll protein (PerCP), Texas Red, Cy3, Cy5, fluorescence resonance energy tandem fluorophores such as PerCP-Cy5.5, PE-Cy5, PE-Cy5.5, PE-Cy7, PE-Texas Red, and APC-Cy7.

[0293] Other fluorophores include, inter alia, Alexa Fluor® 350, Alexa Fluor® 488, Alexa Fluor® 532, Alexa Fluor® 546, Alexa Fluor® 568, Alexa Fluor® 594, Alexa Fluor® 647 (monoclonal antibody labeling kits available from Molecular Probes, Inc., Eugene, Oreg., USA), BODIPY dyes, such as BODIPY 493/503, BODIPY FL, BODIPY R6G, BODIPY 530/550, BODIPY TMR, BODIPY 558/568, BODIPY 558/568, BODIPY 564/570, BODIPY 576/589, BODIPY 581/591, BODIPY TR, BODIPY 630/650, BODIPY 650/665, Cascade Blue, Cascade Yellow, Dansyl, lissamine rhodamine B, Marina Blue, Oregon Green 488, Oregon Green 514, Pacific Blue, rhodamine 6G, rhodamine green, rhodamine red, tetramethylrhodamine, Texas Red (available from Molecular Probes, Inc., Eugene, Oreg., USA), and Cy2, Cy3, Cy3.5, Cy5, Cy5.5, Cy7, all of which are also useful for fluorescently labeling the antibodies of the present invention. For secondary detection using labeled avidin, streptavidin, captavidin or neutravidin, the antibodies of the present invention can usefully be labeled with biotin.

[0294] When the antibodies of the present invention are used, e.g., for western blotting applications, they can usefully be labeled with radioisotopes, such as ³³P, ³²P, ³⁵S, ³H, and ¹²⁵I. As another example, when the antibodies of the present invention are used for radioimmunotherapy, the label can usefully be ²²⁸Th, ²²⁷Ac, ²²⁵Ac, ²²³Ra, ²¹³Bi, ²¹²Pb, ²¹²Bi, ²¹¹At, ²⁰³Pb, ¹⁹⁴Os, ¹⁸⁸Re, ¹⁸⁶Re, ¹⁵³Sm, ¹⁴⁹Tb, ¹³¹I, ¹²⁵I, ¹¹¹In, ¹⁰⁵Rh, ^{99m}Tc, ⁹⁷Ru, ⁹⁰Y, ⁹⁰Sr, ⁸⁸Y, ⁷²Se, ⁶⁷Cu, or ⁴⁷Sc.

[0295] As another example, when the antibodies of the present invention are to be used for in vivo diagnostic use, they can be rendered detectable by conjugation to MRI contrast agents, such as gadolinium diethylenetriaminepentaacetic acid (DTPA), Lauffer et al., Radiology 207(2): 529-38 (1998), or by radioisotopic labeling.

[0296] As would be understood, use of the labels described above is not restricted to the application as for which they were mentioned.

[0297] The antibodies of the present invention, including fragments and derivatives thereof, can also be conjugated to toxins, in order to target the toxin's ablative action to cells that display and/or express the polypeptides of the present invention. Commonly, the antibody in such immunotoxins is conjugated to Pseudomonas exotoxin A, diphtheria toxin, shiga toxin A, anthrax toxin lethal factor, or ricin. See Hall (ed.), Immunotoxin Methods and Protocols (Methods in Molecular Biology, vol. 166), Humana Press (2000); and Frankel et al. (eds.), Clinical Applications of Immunotoxins, Springer-Verlag (1998).

[0298] The antibodies of the present invention can usefully be attached to a substrate, and it is, therefore, another aspect of the invention to provide antibodies that bind specifically to one or more of the polypeptides of the present invention, to one or more of the polypeptides encoded by the isolated nucleic acid molecules of the present invention, or the binding of which can be competitively inhibited by one or more of the polypeptides of the present invention or one or more of the polypeptides encoded by the isolated nucleic acid molecules of the present invention, attached to a substrate. Substrates can be porous or nonporous, planar or nonplanar. For example, the antibodies of the present invention can usefully be conjugated to filtration media, such as NHS-activated Sepharose or CNBr-activated Sepharose for purposes of immunoaffinity chromatography. For example, the antibodies of the present invention can usefully be attached to paramagnetic microspheres, typically by biotin-streptavidin interaction, which microsphere can then be used for isolation of cells that express or display the polypeptides of the present invention. As another example, the antibodies of the present invention can usefully be attached to the surface of a microtiter plate for ELISA.

[0299] As noted above, the antibodies of the present invention can be produced in prokaryotic and eukaryotic cells. It is, therefore, another aspect of the present invention to provide cells that express the antibodies of the present invention, including hybridoma cells, B cells, plasma cells, and host cells recombinantly modified to express the antibodies of the present invention.

[0300] In yet a further aspect, the present invention provides aptamers evolved to bind specifically to one or more of the HSPs of the present invention or to polypeptides encoded by the HSNAs of the invention.

[0301] In sum, one of skill in the art, provided with the teachings of this invention, has available a variety of methods which may be used to alter the biological properties of the antibodies of this invention including methods which would increase or decrease the stability or half-life, immunogenicity, toxicity, affinity or yield of a given antibody molecule, or to alter it in any other way that may render it more suitable for a particular application.

Transgenic Animals and Cells

[0302] In another aspect, the invention provides transgenic cells and non-human organisms comprising nucleic acid molecules of the invention. In a preferred embodiment, the transgenic cells and non-human organisms comprise a nucleic acid molecule encoding a HSP. In a preferred embodiment, the HSP comprises an amino acid sequence selected from SEQ ID NO: 410-611, or a fragment, mutein, homologous protein or allelic variant thereof. In another preferred embodiment, the transgenic cells and non-human organism comprise a HSNA of the invention, preferably a HSNA comprising a nucleotide sequence selected from the group consisting of SEQ ID NO: 1-409, or a part, substantially similar nucleic acid molecule, allelic variant or hybridizing nucleic acid molecule thereof.

[0303] In another embodiment, the transgenic cells and non-human organisms have a targeted disruption or replacement of the endogenous orthologue of the human HSG. The transgenic cells can be embryonic stem cells or somatic cells. The transgenic non-human organisms can be chimeric, nonchimeric heterozygotes, and nonchimeric homozygotes. Methods of producing transgenic animals are well known in the art. See, e.g., Hogan et al., Manipulating the Mouse Embryo: A Laboratory Manual, 2d ed., Cold Spring Harbor Press (1999); Jackson et al., Mouse Genetics and Transgenics: A Practical Approach, Oxford University Press (2000); and Pinkert, Transgenic Animal Technology: A Laboratory Handbook, Academic Press (1999).

[0304] Any technique known in the art may be used to introduce a nucleic acid molecule of the invention into an animal to produce the founder lines of transgenic animals. Such techniques include, but are not limited to, pronuclear microinjection. (see, e.g., Paterson et al., Appl. Microbiol. Biotechnol. 40: 691-698 (1994); Carver et al., Biotechnology 11: 1263-1270 (1993); Wright et al., Biotechnology 9: 830-834 (1991); and U.S. Pat. No. 4,873,191, herein incorporated by reference in its entirety); retrovirus-mediated gene transfer into germ lines, blastocysts or embryos (see, e.g., Van der Putten et al., Proc. Natl. Acad. Sci., USA 82: 6148-6152 (1985)); gene targeting in embryonic stem cells (see, e.g., Thompson et al., Cell 56: 313-321 (1989)); electroporation of cells or embryos (see, e.g., Lo, 1983, Mol. Cell. Biol. 3: 1803-1814 (1983)); introduction using a gene gun (see, e.g., Ulmer et al., Science 259: 1745-49 (1993); introducing nucleic acid constructs into embryonic pleuripotent stem cells and transferring the stem cells back into the blastocyst; and sperm-mediated gene transfer (see, e.g., Lavitrano et al., Cell 57: 717-723 (1989)).

[0305] Other techniques include, for example, nuclear transfer into enucleated oocytes of nuclei from cultured embryonic, fetal, or adult cells induced to quiescence (see, e.g., Campell et al., Nature 380: 64-66 (1996); Wilmut et al., Nature 385: 810-813 (1997)). The present invention provides for transgenic animals that carry the transgene (i.e., a nucleic acid molecule of the invention) in all their cells, as well as animals which carry the transgene in some, but not all their cells, i.e.e., mosaic animals or chimeric animals.

[0306] The transgene may be integrated as a single transgene or as multiple copies, such as in concatamers, e.g., head-to-head tandems or head-to-tail tandems. The transgene may also be selectively introduced into and activated in a particular cell type by following, e.g., the teaching of Lasko et al. et al., Proc. Natl. Acad. Sci. USA 89: 6232-6236 (1992). The regulatory sequences required for such a cell-type specific activation will depend upon the particular cell type of interest, and will be apparent to those of skill in the art.

[0307] Once transgenic animals have been generated, the expression of the recombinant gene may be assayed utilizing standard techniques. Initial screening may be accomplished by Southern blot analysis or PCR techniques to analyze animal tissues to verify that integration of the transgene has taken place. The level of mRNA expression of the transgene in the tissues of the transgenic animals may also be assessed using techniques which include, but are not limited to, Northern blot analysis of tissue samples obtained from the animal, in situ hybridization analysis, and reverse transcriptase-PCR (RT-PCR). Samples of transgenic gene-expressing tissue may also be evaluated immunocytochemically or immunohistochemically using antibodies specific for the transgene product.

[0308] Once the founder animals are produced, they may be bred, inbred, outbred, or crossbred to produce colonies of the particular animal. Examples of such breeding strategies include, but are not limited to: outbreeding of founder animals with more than one integration site in order to establish separate lines; inbreeding of separate lines in order to produce compound transgenics that express the transgene at higher levels because of the effects of additive expression of each transgene; crossing of heterozygous transgenic animals to produce animals homozygous for a given integration site in order to both augment expression and eliminate the need for screening of animals by DNA analysis; crossing of separate homozygous lines to produce compound heterozygous or homozygous lines; and breeding to place the transgene on a distinct background that is appropriate for an experimental model of interest.

[0309] Transgenic animals of the invention have uses which include, but are not limited to, animal model systems useful in elaborating the biological function of polypeptides of the present invention, studying conditions and/or disorders associated with aberrant expression, and in screening for compounds effective in ameliorating such conditions and/or disorders.

[0310] Methods for creating a transgenic animal with a disruption of a targeted gene are also well known in the art. In general, a vector is designed to comprise some nucleotide sequences homologous to the endogenous targeted gene. The vector is introduced into a cell so that it may integrate, via homologous recombination with chromosomal sequences, into the endogenous gene, thereby disrupting the function of the endogenous gene. The transgene may also be selectively introduced into a particular cell type, thus inactivating the endogenous gene in only that cell type. See, e.g., Gu et al., Science 265: 103-106 (1994). The regulatory sequences required for such a cell-type specific inactivation will depend upon the particular cell type of interest, and will be apparent to those of skill in the art. See, e.g., Smithies et al., Nature 317: 230-234 (1985); Thomas et al., Cell 51: 503-512 (1987); Thompson et al., Cell 5: 313-321 (1989).

[0311] In one embodiment, a mutant, non-functional nucleic acid molecule of the invention (or a completely unrelated DNA sequence) flanked by DNA homologous to the endogenous nucleic acid sequence (either the coding regions or regulatory regions of the gene) can be used, with or without a selectable marker and/or a negative selectable marker, to transfect cells that express polypeptides of the invention in vivo. In another embodiment, techniques known in the art are used to generate knockouts in cells that contain, but do not express the gene of interest. Insertion of the DNA construct, via targeted homologous recombination, results in inactivation of the targeted gene. Such approaches are particularly suited in research and agricultural fields where modifications to embryonic stem cells can be used to generate animal offspring with an inactive targeted gene. See, e.g., Thomas, supra and Thompson, supra. However this approach can be routinely adapted for use in humans provided the recombinant DNA constructs are directly administered or targeted to the required site in vivo using appropriate viral vectors that will be apparent to those of skill in the art.

[0312] In further embodiments of the invention, cells that are genetically engineered to express the polypeptides of the invention, or alternatively, that are genetically engineered not to express the polypeptides of the invention (e.g., knockouts) are administered to a patient in vivo. Such cells may be obtained from an animal or patient or an MHC compatible donor and can include, but are not limited to fibroblasts, bone marrow cells, blood cells (e.g., lymphocytes), adipocytes, muscle cells, endothelial cells etc. The cells are genetically engineered in vitro using recombinant DNA techniques to introduce the coding sequence of polypeptides of the invention into the cells, or alternatively, to disrupt the coding sequence and/or endogenous regulatory sequence associated with the polypeptides of the invention, e.g., by transduction (using viral vectors, and preferably vectors that integrate the transgene into the cell genome) or transfection procedures, including, but not limited to, the use of plasmids, cosmids, YACs, naked DNA, electroporation, liposomes, etc.

[0313] The coding sequence of the polypeptides of the invention can be placed under the control of a strong constitutive or inducible promoter or promoter/enhancer to achieve expression, and preferably secretion, of the polypeptides of the invention. The engineered cells which express and preferably secrete the polypeptides of the invention can be introduced into the patient systemically, e.g., in the circulation, or intraperitoneally.

[0314] Alternatively, the cells can be incorporated into a matrix and implanted in the body, e.g., genetically engineered fibroblasts can be implanted as part of a skin graft; genetically engineered endothelial cells can be implanted as part of a lymphatic or vascular graft. See, e.g., U.S. Pat. Nos. 5,399,349 and 5,460,959, each of which is incorporated by reference herein in its entirety.

[0315] When the cells to be administered are non-autologous or non-MHC compatible cells, they can be administered using well known techniques which prevent the development of a host immune response against the introduced cells. For example, the cells may be introduced in an encapsulated form which, while allowing for an exchange of components with the immediate extracellular environment, does not allow the introduced cells to be recognized by the host immune system.

[0316] Transgenic and “knock-out” animals of the invention have uses which include, but are not limited to, animal model systems useful in elaborating the biological function of polypeptides of the present invention, studying conditions and/or disorders associated with aberrant expression, and in screening for compounds effective in ameliorating such conditions and/or disorders.

Computer Readable Means

[0317] A further aspect of the invention is a computer readable means for storing the nucleic acid and amino acid sequences of the instant invention. In a preferred embodiment, the invention provides a computer readable means for storing SEQ ID NO: 410-611 and SEQ ID NO: 1-409 as described herein, as the complete set of sequences or in any combination. The records of the computer readable means can be accessed for reading and display and for interface with a computer system for the application of programs allowing for the location of data upon a query for data meeting certain criteria, the comparison of sequences, the alignment or ordering of sequences meeting a set of criteria, and the like.

[0318] The nucleic acid and amino acid sequences of the invention are particularly useful as components in databases useful for search analyses as well as in sequence analysis algorithms. As used herein, the terms “nucleic acid sequences of the invention” and “amino acid sequences of the invention” mean any detectable chemical or physical characteristic of a polynucleotide or polypeptide of the invention that is or may be reduced to or stored in a computer readable form. These include, without limitation, chromatographic scan data or peak data, photographic data or scan data therefrom, and mass spectrographic data.

[0319] This invention provides computer readable media having stored thereon sequences of the invention. A computer readable medium may comprise one or more of the following: a nucleic acid sequence comprising a sequence of a nucleic acid sequence of the invention; an amino acid sequence comprising an amino acid sequence of the invention; a set of nucleic acid sequences wherein at least one of said sequences comprises the sequence of a nucleic acid sequence of the invention; a set of amino acid sequences wherein at least one of said sequences comprises the sequence of an amino acid sequence of the invention; a data set representing a nucleic acid sequence comprising the sequence of one or more nucleic acid sequences of the invention; a data set representing a nucleic acid sequence encoding an amino acid sequence comprising the sequence of an amino acid sequence of the invention; a set of nucleic acid sequences wherein at least one of said sequences comprises the sequence of a nucleic acid sequence of the invention; a set of amino acid sequences wherein at least one of said sequences comprises the sequence of an amino acid sequence of the invention; a data set representing a nucleic acid sequence comprising the sequence of a nucleic acid sequence of the invention; a data set representing a nucleic acid sequence encoding an amino acid sequence comprising the sequence of an amino acid sequence of the invention. The computer readable medium can be any composition of matter used to store information or data, including, for example, commercially available floppy disks, tapes, hard drives, compact disks, and video disks.

[0320] Also provided by the invention are methods for the analysis of character sequences, particularly genetic sequences. Preferred methods of sequence analysis include, for example, methods of sequence homology analysis, such as identity and similarity analysis, RNA structure analysis, sequence assembly, cladistic analysis, sequence motif analysis, open reading frame determination, nucleic acid base calling, and sequencing chromatogram peak analysis.

[0321] A computer-based method is provided for performing nucleic acid sequence identity or similarity identification. This method comprises the steps of providing a nucleic acid sequence comprising the sequence of a nucleic acid of the invention in a computer readable medium; and comparing said nucleic acid sequence to at least one nucleic acid or amino acid sequence to identify sequence identity or similarity.

[0322] A computer-based method is also provided for performing amino acid homology identification, said method comprising the steps of: providing an amino acid sequence comprising the sequence of an amino acid of the invention in a computer readable medium; and comparing said amino acid sequence to at least one nucleic acid or an amino acid sequence to identify homology.

[0323] A computer-based method is still further provided for assembly of overlapping nucleic acid sequences into a single nucleic acid sequence, said method comprising the steps of: providing a first nucleic acid sequence comprising the sequence of a nucleic acid of the invention in a computer readable medium; and screening for at least one overlapping region between said first nucleic acid sequence and a second nucleic acid sequence. In addition, the invention includes a method of using patterns of expression associated with either the nucleic acids or proteins in a computer-based method to diagnose disease.

Diagnostic Methods for Hepatic Cancer

[0324] The present invention also relates to quantitative and qualitative diagnostic assays and methods for detecting, diagnosing, monitoring, staging and predicting cancers by comparing expression of a HSNA or a HSP in a human patient that has or may have hepatic cancer, or who is at risk of developing hepatic cancer, with the expression of a HSNA or a HSP in a normal human control. For purposes of the present invention, “expression of a HSNA” or “HSNA expression” means the quantity of HSNA mRNA that can be measured by any method known in the art or the level of transcription that can be measured by any method known in the art in a cell, tissue, organ or whole patient. Similarly, the term “expression of a HSP” or “HSP expression” means the amount of HSP that can be measured by any method known in the art or the level of translation of a HSNA that can be measured by any method known in the art.

[0325] The present invention provides methods for diagnosing hepatic cancer in a patient, by analyzing for changes in levels of HSNA or HSP in cells, tissues, organs or bodily fluids compared with levels of HSNA or HSP in cells, tissues, organs or bodily fluids of preferably the same type from a normal human control, wherein an increase, or decrease in certain cases, in levels of a HSNA or HSP in the patient versus the normal human control is associated with the presence of hepatic cancer or with a predilection to the disease. In another preferred embodiment, the present invention provides methods for diagnosing hepatic cancer in a patient by analyzing changes in the structure of the mRNA of a HSG compared to the mRNA from a normal control. These changes include, without limitation, aberrant splicing, alterations in polyadenylation and/or alterations in 5′ nucleotide capping. In yet another preferred embodiment, the present invention provides methods for diagnosing hepatic cancer in a patient by analyzing changes in a HSP compared to a HSP from a normal patient. These changes include, e.g., alterations, including post translational modifications such as glycosylation and/or phosphorylation of the HSP or changes in the subcellular HSP localization.

[0326] For purposes of the present invention, diagnosing means that HSNA or HSP levels are used to determine the presence or absence of disease in a patient. As will be understood by those of skill in the art, measurement of other diagnostic parameters may be required for definitive diagnosis or determination of the appropriate treatment for the disease. The determination may be made by a clinician, a doctor, a testing laboratory, or a patient using an over the counter test. The patient may have symptoms of disease or may be asymptomatic. In addition, the HSNA or HSP levels of the present invention may be used as screening marker to determine whether further tests or biopsies are warranted. In addition, the HSNA or HSP levels may be used to determine the vulnerability or susceptibility to disease.

[0327] In a preferred embodiment, the expression of a HSNA is measured by determining the amount of a mRNA that encodes an amino acid sequence selected from SEQ ID NO: 410-611, a homolog, an allelic variant, or a fragment thereof. In a more preferred embodiment, the HSNA expression that is measured is the level of expression of a HSNA mRNA selected from SEQ ID NO: 1-409, or a hybridizing nucleic acid, homologous nucleic acid or allelic variant thereof, or a part of any of these nucleic acid molecules. HSNA expression may be measured by any method known in the art, such as those described supra, including measuring mRNA expression by Northern blot, quantitative or qualitative reverse transcriptase PCR (RT-PCR), microarray, dot or slot blots or in situ hybridization. See, e.g., Ausubel (1992), supra; Ausubel (1999), supra; Sambrook (1989), supra; and Sambrook (2001), supra. HSNA transcription may be measured by any method known in the art including using a reporter gene hooked up to the promoter of a HSG of interest or doing nuclear run-off assays. Alterations in mRNA structure, e.g., aberrant splicing variants, may be determined by any method known in the art, including, RT-PCR followed by sequencing or restriction analysis. As necessary, HSNA expression may be compared to a known control, such as normal hepatic nucleic acid, to detect a change in expression.

[0328] In another preferred embodiment, the expression of a HSP is measured by determining the level of a HSP having an amino acid sequence selected from the group consisting of SEQ ID NO: 410-611, a homolog, an allelic variant, or a fragment thereof. Such levels are preferably determined in at least one of cells, tissues, organs and/or bodily fluids, including determination of normal and abnormal levels. Thus, for instance, a diagnostic assay in accordance with the invention for diagnosing over- or underexpression of a HSNA or HSP compared to normal control bodily fluids, cells, or tissue samples may be used to diagnose the presence of hepatic cancer. The expression level of a HSP may be determined by any method known in the art, such as those described supra. In a preferred embodiment, the HSP expression level may be determined by radioimmunoassays, competitive-binding assays, ELISA, Western blot, FACS, immunohistochemistry, immunoprecipitation, proteomic approaches: two-dimensional gel electrophoresis (2D electrophoresis) and non-gel-based approaches such as mass spectrometry or protein interaction profiling. See, e.g, Harlow (1999), supra; Ausubel (1992), supra; and Ausubel (1999), supra. Alterations in the HSP structure may be determined by any method known in the art, including, e.g., using antibodies that specifically recognize phosphoserine, phosphothreonine or phosphotyrosine residues, two-dimensional polyacrylamide gel electrophoresis (2D PAGE) and/or chemical analysis of amino acid residues of the protein. Id.

[0329] In a preferred embodiment, a radioimmunoassay (RIA) or an ELISA is used. An antibody specific to a HSP is prepared if one is not already available. In a preferred embodiment, the antibody is a monoclonal antibody. The anti-HSP antibody is bound to a solid support and any free protein binding sites on the solid support are blocked with a protein such as bovine serum albumin. A sample of interest is incubated with the antibody on the solid support under conditions in which the HSP will bind to the anti-HSP antibody. The sample is removed, the solid support is washed to remove unbound material, and an anti-HSP antibody that is linked to a detectable reagent (a radioactive substance for RIA and an enzyme for ELISA) is added to the solid support and incubated under conditions in which binding of the HSP to the labeled antibody will occur. After binding, the unbound labeled antibody is removed by washing. For an ELISA, one or more substrates are added to produce a colored reaction product that is based upon the amount of an HSP in the sample. For an RIA, the solid support is counted for radioactive decay signals by any method known in the art. Quantitative results for both RIA and ELISA typically are obtained by reference to a standard curve.

[0330] Other methods to measure HSP levels are known in the art. For instance, a competition assay may be employed wherein an anti-HSP antibody is attached to a solid support and an allocated amount of a labeled HSP and a sample of interest are incubated with the solid support. The amount of labeled HSP attached to the solid support can be correlated to the quantity of a HSP in the sample.

[0331] Of the proteomic approaches, 2D PAGE is a well known technique. Isolation of individual proteins from a sample such as serum is accomplished using sequential separation of proteins by isoelectric point and molecular weight. Typically, polypeptides are first separated by isoelectric point (the first dimension) and then separated by size using an electric current (the second dimension). In general, the second dimension is perpendicular to the first dimension. Because no two proteins with different sequences are identical on the basis of both size and charge, the result of 2D PAGE is a roughly square gel in which each protein occupies a unique spot. Analysis of the spots with chemical or antibody probes, or subsequent protein microsequencing can reveal the relative abundance of a given protein and the identity of the proteins in the sample.

[0332] Expression levels of a HSNA can be determined by any method known in the art, including PCR and other nucleic acid methods, such as ligase chain reaction (LCR) and nucleic acid sequence based amplification (NASBA), can be used to detect malignant cells for diagnosis and monitoring of various malignancies. For example, reverse-transcriptase PCR (RT-PCR) is a powerful technique which can be used to detect the presence of a specific mRNA population in a complex mixture of thousands of other mRNA species. In RT-PCR, an mRNA species is first reverse transcribed to complementary DNA (cDNA) with use of the enzyme reverse transcriptase; the cDNA is then amplified as in a standard PCR reaction.

[0333] Hybridization to specific DNA molecules (e.g., oligonucleotides) arrayed on a solid support can be used to both detect the expression of and quantitate the level of expression of one or more HSNAs of interest. In this approach, all or a portion of one or more HSNAs is fixed to a substrate. A sample of interest, which may comprise RNA, e.g., total RNA or polyA-selected mRNA, or a complementary DNA (cDNA) copy of the RNA is incubated with the solid support under conditions in which hybridization will occur between the DNA on the solid support and the nucleic acid molecules in the sample of interest. Hybridization between the substrate-bound DNA and the nucleic acid molecules in the sample can be detected and quantitated by several means, including, without limitation, radioactive labeling or fluorescent labeling of the nucleic acid molecule or a secondary molecule designed to detect the hybrid.

[0334] The above tests can be carried out on samples derived from a variety of cells, bodily fluids and/or tissue extracts such as homogenates or solubilized tissue obtained from a patient. Tissue extracts are obtained routinely from tissue biopsy and autopsy material. Bodily fluids useful in the present invention include blood, urine, saliva or any other bodily secretion or derivative thereof. As used herein “blood” includes whole blood, plasma, serum, circulating epithelial cells, constituents, or any derivative of blood.

[0335] In addition to detection in bodily fluids, the proteins and nucleic acids of the invention are suitable to detection by cell capture technology. Whole cells may be captured by a variety methods for example magnetic separation, U.S. Pat. Nos. 5,200,084; 5,186,827; 5,108,933; 4,925,788, the disclosures of which are incorporated herein by reference in their entireties. Epithelial cells may be captured using such products as Dynabeads® or CELLection™ (Dynal Biotech, Oslo, Norway). Alternatively, fractions of blood may be captured, e.g., the buffy coat fraction (50 mm cells isolated from 5 ml of blood) containing epithelial cells. In addition, cancer cells may be captured using the techniques described in WO 00/47998, the disclosure of which is incorporated herein by reference in its entirety. Once the cells are captured or concentrated, the proteins or nucleic acids are detected by the means described in the subject application. Alternatively, nucleic acids may be captured directly from blood samples, see U.S. Pat. Nos. 6,156,504, 5,501,963; or WO 01/42504, the disclosures of which are incorporated herein by reference in their entireties.

[0336] In a preferred embodiment, the specimen tested for expression of HSNA or HSP includes without limitation hepatic tissue, hepatic cells grown in cell culture, blood, serum, lymph node tissue, and lymphatic fluid. In another preferred embodiment, especially when metastasis of a primary hepatic cancer is known or suspected, specimens include, without limitation, tissues from brain, bone, bone marrow, liver, lungs, colon, and adrenal glands. In general, the tissues may be sampled by biopsy, including, without limitation, needle biopsy, e.g., transthoracic needle aspiration, cervical mediatinoscopy, endoscopic lymph node biopsy, video-assisted thoracoscopy, exploratory thoracotomy, bone marrow biopsy and bone marrow aspiration.

[0337] All the methods of the present invention may optionally include determining the expression levels of one or more other cancer markers in addition to determining the expression level of a HSNA or HSP. In many cases, the use of another cancer marker will decrease the likelihood of false positives or false negatives. In one embodiment, the one or more other cancer markers include other HSNA or HSPs as disclosed herein. Other cancer markers useful in the present invention will depend on the cancer being tested and are known to those of skill in the art. In a preferred embodiment, at least one other cancer marker in addition to a particular HSNA or HSP is measured. In a more preferred embodiment, at least two other additional cancer markers are used. In an even more preferred embodiment, at least three, more preferably at least five, even more preferably at least ten additional cancer markers are used.

[0338] Diagnosing

[0339] In one aspect, the invention provides a method for determining the expression levels and/or structural alterations of one or more HSNA and/or HSP in a sample from a patient suspected of having hepatic cancer. In general, the method comprises the steps of obtaining the sample from the patient, determining the expression level or structural alterations of a HSNA and/or HSP and then ascertaining whether the patient has hepatic cancer from the expression level of the HSNA or HSP. In general, if high expression relative to a control of a HSNA or HSP is indicative of hepatic cancer, a diagnostic assay is considered positive if the level of expression of the HSNA or HSP is at least one and a half times higher, and more preferably are at least two times higher, still more preferably five times higher, even more preferably at least ten times higher, than in preferably the same cells, tissues or bodily fluid of a normal human control. In contrast, if low expression relative to a control of a HSNA or HSP is indicative of hepatic cancer, a diagnostic assay is considered positive if the level of expression of the HSNA or HSP is at least one and a half times lower, and more preferably are at least two times lower, still more preferably five times lower, even more preferably at least ten times lower than in preferably the same cells, tissues or bodily fluid of a normal human control. The normal human control may be from a different patient or from uninvolved tissue of the same patient.

[0340] The present invention also provides a method of determining whether hepatic cancer has metastasized in a patient. One may identify whether the hepatic cancer has metastasized by measuring the expression levels and/or structural alterations of one or more HSNAs and/or HSPs in a variety of tissues. The presence of a HSNA or HSP in a certain tissue at levels higher than that of corresponding noncancerous tissue (e.g. the same tissue from another individual) is indicative of metastasis if high level expression of a HSNA or HSP is associated with hepatic cancer. Similarly, the presence of a HSNA or HSP in a tissue at levels lower than that of corresponding noncancerous tissue is indicative of metastasis if low level expression of a HSNA or HSP is associated with hepatic cancer. Further, the presence of a structurally altered HSNA or HSP that is associated with hepatic cancer is also indicative of metastasis.

[0341] In general, if high expression relative to a control of a HSNA or HSP is indicative of metastasis, an assay for metastasis is considered positive if the level of expression of the HSNA or HSP is at least one and a half times higher, and more preferably are at least two times higher, still more preferably five times higher, even more preferably at least ten times higher, than in preferably the same cells, tissues or bodily fluid of a normal human control. In contrast, if low expression relative to a control of a HSNA or HSP is indicative of metastasis, an assay for metastasis is considered positive if the level of expression of the HSNA or HSP is at least one and a half times lower, and more preferably are at least two times lower, still more preferably five times lower, even more preferably at least ten times lower than in preferably the same cells, tissues or bodily fluid of a normal human control.

[0342] Staging

[0343] The invention also provides a method of staging hepatic cancer in a human patient. The method comprises identifying a human patient having hepatic cancer and analyzing cells, tissues or bodily fluids from such human patient for expression levels and/or structural alterations of one or more HSNAs or HSPs. First, one or more tumors from a variety of patients are staged according to procedures well known in the art, and the expression levels of one or more HSNAs or HSPs is determined for each stage to obtain a standard expression level for each HSNA and HSP. Then, the HSNA or HSP expression levels of the HSNA or HSP are determined in a biological sample from a patient whose stage of cancer is not known. The HSNA or HSP expression levels from the patient are then compared to the standard expression level. By comparing the expression level of the HSNAs and HSPs from the patient to the standard expression levels, one may determine the stage of the tumor. The same procedure may be followed using structural alterations of a HSNA or HSP to determine the stage of a hepatic cancer.

[0344] Monitoring

[0345] Further provided is a method of monitoring hepatic cancer in a human patient. One may monitor a human patient to determine whether there has been metastasis and, if there has been, when metastasis began to occur. One may also monitor a human patient to determine whether a preneoplastic lesion has become cancerous. One may also monitor a human patient to determine whether a therapy, e.g., chemotherapy, radiotherapy or surgery, has decreased or eliminated the hepatic cancer. The monitoring may determine if there has been a reoccurrence and, if so, determine its nature. The method comprises identifying a human patient that one wants to monitor for hepatic cancer, periodically analyzing cells, tissues or bodily fluids from such human patient for expression levels of one or more HSNAs or HSPs, and comparing the HSNA or HSP levels over time to those HSNA or HSP expression levels obtained previously. Patients may also be monitored by measuring one or more structural alterations in a HSNA or HSP that are associated with hepatic cancer.

[0346] If increased expression of a HSNA or HSP is associated with metastasis, treatment failure, or conversion of a preneoplastic lesion to a cancerous lesion, then detecting an increase in the expression level of a HSNA or HSP indicates that the tumor is metastasizing, that treatment has failed or that the lesion is cancerous, respectively. One having ordinary skill in the art would recognize that if this were the case, then a decreased expression level would be indicative of no metastasis, effective therapy or failure to progress to a neoplastic lesion. If decreased expression of a HSNA or HSP is associated with metastasis, treatment failure, or conversion of a preneoplastic lesion to a cancerous lesion, then detecting a decrease in the expression level of a HSNA or HSP indicates that the tumor is metastasizing, that treatment has failed or that the lesion is cancerous, respectively. In a preferred embodiment, the levels of HSNAs or HSPs are determined from the same cell type, tissue or bodily fluid as prior patient samples. Monitoring a patient for onset of hepatic cancer metastasis is periodic and preferably is done on a quarterly basis, but may be done more or less frequently.

[0347] The methods described herein can further be utilized as prognostic assays to identify subjects having or at risk of developing a disease or disorder associated with increased or decreased expression levels of a HSNA and/or HSP. The present invention provides a method in which a test sample is obtained from a human patient and one or more HSNAs and/or HSPs are detected. The presence of higher (or lower) HSNA or HSP levels as compared to normal human controls is diagnostic for the human patient being at risk for developing cancer, particularly hepatic cancer. The effectiveness of therapeutic agents to decrease (or increase) expression or activity of one or more HSNAs and/or HSPs of the invention can also be monitored by analyzing levels of expression of the HSNAs and/or HSPs in a human patient in clinical trials or in in vitro screening assays such as in human cells. In this way, the gene expression pattern can serve as a marker, indicative of the physiological response of the human patient or cells, as the case may be, to the agent being tested.

[0348] Detection of Genetic Lesions or Mutations

[0349] The methods of the present invention can also be used to detect genetic lesions or mutations in a HSG, thereby determining if a human with the genetic lesion is susceptible to developing hepatic cancer or to determine what genetic lesions are responsible, or are partly responsible, for a person's existing hepatic cancer. Genetic lesions can be detected, for example, by ascertaining the existence of a deletion, insertion and/or substitution of one or more nucleotides from the HSGs of this invention, a chromosomal rearrangement of a HSG, an aberrant modification of a HSG (such as of the methylation pattern of the genomic DNA), or allelic loss of a HSG. Methods to detect such lesions in the HSG of this invention are known to those having ordinary skill in the art following the teachings of the specification.

Methods of Detecting Noncancerous Hepatic Diseases

[0350] The present invention also provides methods for determining the expression levels and/or structural alterations of one or more HSNAs and/or HSPs in a sample from a patient suspected of having or known to have a noncancerous hepatic disease. In general, the method comprises the steps of obtaining a sample from the patient, determining the expression level or structural alterations of a HSNA and/or HSP, comparing the expression level or structural alteration of the HSNA or HSP to a normal hepatic control, and then ascertaining whether the patient has a noncancerous hepatic disease. In general, if high expression relative to a control of a HSNA or HSP is indicative of a particular noncancerous hepatic disease, a diagnostic assay is considered positive if the level of expression of the HSNA or HSP is at least two times higher, and more preferably are at least five times higher, even more preferably at least ten times higher, than in preferably the same cells, tissues or bodily fluid of a normal human control. In contrast, if low expression relative to a control of a HSNA or HSP is indicative of a noncancerous hepatic disease, a diagnostic assay is considered positive if the level of expression of the HSNA or HSP is at least two times lower, more preferably are at least five times lower, even more preferably at least ten times lower than in preferably the same cells, tissues or bodily fluid of a normal human control. The normal human control may be from a different patient or from uninvolved tissue of the same patient.

[0351] One having ordinary skill in the art may determine whether a HSNA and/or HSP is associated with a particular noncancerous hepatic disease by obtaining hepatic tissue from a patient having a noncancerous hepatic disease of interest and determining which HSNAs and/or HSPs are expressed in the tissue at either a higher or a lower level than in normal hepatic tissue. In another embodiment, one may determine whether a HSNA or HSP exhibits structural alterations in a particular noncancerous hepatic disease state by obtaining hepatic tissue from a patient having a noncancerous hepatic disease of interest and determining the structural alterations in one or more HSNAs and/or HSPs relative to normal hepatic tissue.

Methods for Identifying Hepatic Tissue

[0352] In another aspect, the invention provides methods for identifying hepatic tissue. These methods are particularly useful in, e.g., forensic science, hepatic cell differentiation and development, and in tissue engineering.

[0353] In one embodiment, the invention provides a method for determining whether a sample is hepatic tissue or has hepatic tissue-like characteristics. The method comprises the steps of providing a sample suspected of comprising hepatic tissue or having hepatic tissue-like characteristics, determining whether the sample expresses one or more HSNAs and/or HSPs, and, if the sample expresses one or more HSNAs and/or HSPs, concluding that the sample comprises hepatic tissue. In a preferred embodiment, the HSNA encodes a polypeptide having an amino acid sequence selected from SEQ ID NO: 410-611, or a homolog, allelic variant or fragment thereof. In a more preferred embodiment, the HSNA has a nucleotide sequence selected from SEQ ID NO: 1-409, or a hybridizing nucleic acid, an allelic variant or a part thereof. Determining whether a sample expresses a HSNA can be accomplished by any method known in the art. Preferred methods include hybridization to microarrays, Northern blot hybridization, and quantitative or qualitative RT-PCR. In another preferred embodiment, the method can be practiced by determining whether a HSP is expressed. Determining whether a sample expresses a HSP can be accomplished by any method known in the art. Preferred methods include Western blot, ELISA, RIA and 2D PAGE. In one embodiment, the HSP has an amino acid sequence selected from SEQ ID NO: 410-611, or a homolog, allelic variant or fragment thereof. In another preferred embodiment, the expression of at least two HSNAs and/or HSPs is determined. In a more preferred embodiment, the expression of at least three, more preferably four and even more preferably five HSNAs and/or HSPs are determined.

[0354] In one embodiment, the method can be used to determine whether an unknown tissue is hepatic tissue. This is particularly useful in forensic science, in which small, damaged pieces of tissues that are not identifiable by microscopic or other means are recovered from a crime or accident scene. In another embodiment, the method can be used to determine whether a tissue is differentiating or developing into hepatic tissue. This is important in monitoring the effects of the addition of various agents to cell or tissue culture, e.g., in producing new hepatic tissue by tissue engineering. These agents include, e.g., growth and differentiation factors, extracellular matrix proteins and culture medium. Other factors that may be measured for effects on tissue development and differentiation include gene transfer into the cells or tissues, alterations in pH, aqueous:air interface and various other culture conditions.

Methods for Producing and Modifying Hepatic Tissue

[0355] In another aspect, the invention provides methods for producing engineered hepatic tissue or cells. In one embodiment, the method comprises the steps of providing cells, introducing a HSNA or a HSG into the cells, and growing the cells under conditions in which they exhibit one or more properties of hepatic tissue cells. In a preferred embodiment, the cells are pleuripotent. As is well known in the art, normal hepatic tissue comprises a large number of different cell types. Thus, in one embodiment, the engineered hepatic tissue or cells comprises one of these cell types. In another embodiment, the engineered hepatic tissue or cells comprises more than one hepatic cell type. Further, the culture conditions of the cells or tissue may require manipulation in order to achieve full differentiation and development of the hepatic cell tissue. Methods for manipulating culture conditions are well known in the art.

[0356] Nucleic acid molecules encoding one or more HSPs are introduced into cells, preferably pleuripotent cells. In a preferred embodiment, the nucleic acid molecules encode HSPs having amino acid sequences selected from SEQ ID NO: 410-611, or homologous proteins, analogs, allelic variants or fragments thereof. In a more preferred embodiment, the nucleic acid molecules have a nucleotide sequence selected from SEQ ID NO: 1-409, or hybridizing nucleic acids, allelic variants or parts thereof. In another highly preferred embodiment, a HSG is introduced into the cells. Expression vectors and methods of introducing nucleic acid molecules into cells are well known in the art and are described in detail, supra.

[0357] Artificial hepatic tissue may be used to treat patients who have lost some or all of their hepatic function.

Pharmaceutical Compositions

[0358] In another aspect, the invention provides pharmaceutical compositions comprising the nucleic acid molecules, polypeptides, fusion proteins, antibodies, antibody derivatives, antibody fragments, agonists, antagonists, or inhibitors of the present invention. In a preferred embodiment, the pharmaceutical composition comprises a HSNA or part thereof. In a more preferred embodiment, the HSNA has a nucleotide sequence selected from the group consisting of SEQ ID NO: 1-409, a nucleic acid that hybridizes thereto, an allelic variant thereof, or a nucleic acid that has substantial sequence identity thereto. In another preferred embodiment, the pharmaceutical composition comprises a HSP or fragment thereof. In a more preferred embodiment, the pharmaceutical composition comprises a HSP having an amino acid sequence that is selected from the group consisting of SEQ ID NO: 410-611, a polypeptide that is homologous thereto, a fusion protein comprising all or a portion of the polypeptide, or an analog or derivative thereof. In another preferred embodiment, the pharmaceutical composition comprises an anti-HSP antibody, preferably an antibody that specifically binds to a HSP having an amino acid that is selected from the group consisting of SEQ ID NO: 410-611, or an antibody that binds to a polypeptide that is homologous thereto, a fusion protein comprising all or a portion of the polypeptide, or an analog or derivative thereof.

[0359] Such a composition typically contains from about 0.1 to 90% by weight of a therapeutic agent of the invention formulated in and/or with a pharmaceutically acceptable carrier or excipient.

[0360] Pharmaceutical formulation is a well-established art that is further described in Gennaro (ed.), Remington: The Science and Practice of Pharmacy, 20^{th} ed., Lippincott, Williams & Wilkins (2000); Ansel et al., Pharmaceutical Dosage Forms and Drug Delivery Systems, 7^{th} ed., Lippincott Williams & Wilkins (1999); and Kibbe (ed.), Handbook of Pharmaceutical Excipients American Pharmaceutical Association, 3^{rd} ed. (2000) and thus need not be described in detail herein.

[0361] Briefly, formulation of the pharmaceutical compositions of the present invention will depend upon the route chosen for administration. The pharmaceutical compositions utilized in this invention can be administered by various routes including both enteral and parenteral routes, including oral, intravenous, intramuscular, subcutaneous, inhalation, topical, sublingual, rectal, intra-arterial, intramedullary, intrathecal, intraventricular, transmucosal, transdermal, intranasal, intraperitoneal, intrapulmonary, and intrauterine.

[0362] Oral dosage forms can be formulated as tablets, pills, dragees, capsules, liquids, gels, syrups, slurries, suspensions, and the like, for ingestion by the patient.

[0363] Solid formulations of the compositions for oral administration can contain suitable carriers or excipients, such as carbohydrate or protein fillers, such as sugars, including lactose, sucrose, mannitol, or sorbitol; starch from corn, wheat, rice, potato, or other plants; cellulose, such as methyl cellulose, hydroxypropylmethyl-cellulose, sodium carboxymethylcellulose, or microcrystalline cellulose; gums including arabic and tragacanth; proteins such as gelatin and collagen; inorganics, such as kaolin, calcium carbonate, dicalcium phosphate, sodium chloride; and other agents such as acacia and alginic acid.

[0364] Agents that facilitate disintegration and/or solubilization can be added, such as the cross-linked polyvinyl pyrrolidone, agar, alginic acid, or a salt thereof, such as sodium alginate, microcrystalline cellulose, cornstarch, sodium starch glycolate, and alginic acid.

[0365] Tablet binders that can be used include acacia, methylcellulose, sodium carboxymethylcellulose, polyvinylpyrrolidone (Povidone™), hydroxypropyl methylcellulose, sucrose, starch and ethylcellulose.

[0366] Lubricants that can be used include magnesium stearates, stearic acid, silicone fluid, talc, waxes, oils, and colloidal silica.

[0367] Fillers, agents that facilitate disintegration and/or solubilization, tablet binders and lubricants, including the aforementioned, can be used singly or in combination.

[0368] Solid oral dosage forms need not be uniform throughout. For example, dragee cores can be used in conjunction with suitable coatings, such as concentrated sugar solutions, which can also contain gum arabic, talc, polyvinylpyrrolidone, carbopol gel, polyethylene glycol, and/or titanium dioxide, lacquer solutions, and suitable organic solvents or solvent mixtures.

[0369] Oral dosage forms of the present invention include push-fit capsules made of gelatin, as well as soft, sealed capsules made of gelatin and a coating, such as glycerol or sorbitol. Push-fit capsules can contain active ingredients mixed with a filler or binders, such as lactose or starches, lubricants, such as talc or magnesium stearate, and, optionally, stabilizers. In soft capsules, the active compounds can be dissolved or suspended in suitable liquids, such as fatty oils, liquid, or liquid polyethylene glycol with or without stabilizers.

[0370] Additionally, dyestuffs or pigments can be added to the tablets or dragee coatings for product identification or to characterize the quantity of active compound, i.e., dosage.

[0371] Liquid formulations of the pharmaceutical compositions for oral (enteral) administration are prepared in water or other aqueous vehicles and can contain various suspending agents such as methylcellulose, alginates, tragacanth, pectin, kelgin, carrageenan, acacia, polyvinylpyrrolidone, and polyvinyl alcohol. The liquid formulations can also include solutions, emulsions, syrups and elixirs containing, together with the active compound(s), wetting agents, sweeteners, and coloring and flavoring agents.

[0372] The pharmaceutical compositions of the present invention can also be formulated for parenteral administration. Formulations for parenteral administration can be in the form of aqueous or non-aqueous isotonic sterile injection solutions or suspensions.

[0373] For intravenous injection, water soluble versions of the compounds of the present invention are formulated in, or if provided as a lyophilate, mixed with, a physiologically acceptable fluid vehicle, such as 5% dextrose (“D5”), physiologically buffered saline, 0.9% saline, Hanks' solution, or Ringer's solution. Intravenous formulations may include carriers, excipients or stabilizers including, without limitation, calcium, human serum albumin, citrate, acetate, calcium chloride, carbonate, and other salts.

[0374] Intramuscular preparations, e.g. a sterile formulation of a suitable soluble salt form of the compounds of the present invention, can be dissolved and administered in a pharmaceutical excipient such as Water-for-Injection, 0.9% saline, or 5% glucose solution. Alternatively, a suitable insoluble form of the compound can be prepared and administered as a suspension in an aqueous base or a pharmaceutically acceptable oil base, such as an ester of a long chain fatty acid (e.g. ethyl oleate), fatty oils such as sesame oil, triglycerides, or liposomes.

[0375] Parenteral formulations of the compositions can contain various carriers such as vegetable oils, dimethylacetamide, dimethylformamide, ethyl lactate, ethyl carbonate, isopropyl myristate, ethanol, polyols (glycerol, propylene glycol, liquid polyethylene glycol, and the like).

[0376] Aqueous injection suspensions can also contain substances that increase the viscosity of the suspension, such as sodium carboxymethyl cellulose, sorbitol, or dextran. Non-lipid polycationic amino polymers can also be used for delivery. Optionally, the suspension can also contain suitable stabilizers or agents that increase the solubility of the compounds to allow for the preparation of highly concentrated solutions.

[0377] Pharmaceutical compositions of the present invention can also be formulated to permit injectable, long-term, deposition. Injectable depot forms may be made by forming microencapsulated matrices of the compound in biodegradable polymers such as polylactide-polyglycolide. Depending upon the ratio of drug to polymer and the nature of the particular polymer employed, the rate of drug release can be controlled. Examples of other biodegradable polymers include poly(orthoesters) and poly(anhydrides). Depot injectable formulations are also prepared by entrapping the drug in microemulsions that are compatible with body tissues.

[0378] The pharmaceutical compositions of the present invention can be administered topically. For topical use the compounds of the present invention can also be prepared in suitable forms to be applied to the skin, or mucus membranes of the nose and throat, and can take the form of lotions, creams, ointments, liquid sprays or inhalants, drops, tinctures, lozenges, or throat paints. Such topical formulations further can include chemical compounds such as dimethylsulfoxide (DMSO) to facilitate surface penetration of the active ingredient. In other transdermal formulations, typically in patch-delivered formulations, the pharmaceutically active compound is formulated with one or more skin penetrants, such as 2-N-methyl-pyrrolidone (NMP) or Azone. A topical semi-solid ointment formulation typically contains a concentration of the active ingredient from about 1 to 20%, e.g., 5 to 10%, in a carrier such as a pharmaceutical cream base.

[0379] For application to the eyes or ears, the compounds of the present invention can be presented in liquid or semi-liquid form formulated in hydrophobic or hydrophilic bases as ointments, creams, lotions, paints or powders.

[0380] For rectal administration the compounds of the present invention can be administered in the form of suppositories admixed with conventional carriers such as cocoa butter, wax or other glyceride.

[0381] Inhalation formulations can also readily be formulated. For inhalation, various powder and liquid formulations can be prepared. For aerosol preparations, a sterile formulation of the compound or salt form of the compound may be used in inhalers, such as metered dose inhalers, and nebulizers. Aerosolized forms may be especially useful for treating respiratory disorders.

[0382] Alternatively, the compounds of the present invention can be in powder form for reconstitution in the appropriate pharmaceutically acceptable carrier at the time of delivery.

[0383] The pharmaceutically active compound in the pharmaceutical compositions of the present invention can be provided as the salt of a variety of acids, including but not limited to hydrochloric, sulfuric, acetic, lactic, tartaric, malic, and succinic acid. Salts tend to be more soluble in aqueous or other protonic solvents than are the corresponding free base forms.

[0384] After pharmaceutical compositions have been prepared, they are packaged in an appropriate container and labeled for treatment of an indicated condition.

[0385] The active compound will be present in an amount effective to achieve the intended purpose. The determination of an effective dose is well within the capability of those skilled in the art.

[0386] A “therapeutically effective dose” refers to that amount of active ingredient, for example HSP polypeptide, fusion protein, or fragments thereof, antibodies specific for HSP, agonists, antagonists or inhibitors of HSP, which ameliorates the signs or symptoms of the disease or prevent progression thereof; as would be understood in the medical arts, cure, although desired, is not required.

[0387] The therapeutically effective dose of the pharmaceutical agents of the present invention can be estimated initially by in vitro tests, such as cell culture assays, followed by assay in model animals, usually mice, rats, rabbits, dogs, or pigs. The animal model can also be used to determine an initial preferred concentration range and route of administration.

[0388] For example, the ED50 (the dose therapeutically effective in 50% of the population) and LD50 (the dose lethal to 50% of the population) can be determined in one or more cell culture of animal model systems. The dose ratio of toxic to therapeutic effects is the therapeutic index, which can be expressed as LD50/ED50. Pharmaceutical compositions that exhibit large therapeutic indices are preferred.

[0389] The data obtained from cell culture assays and animal studies are used in formulating an initial dosage range for human use, and preferably provide a range of circulating concentrations that includes the ED50 with little or no toxicity. After administration, or between successive administrations, the circulating concentration of active agent varies within this range depending upon pharmacokinetic factors well known in the art, such as the dosage form employed, sensitivity of the patient, and the route of administration.

[0390] The exact dosage will be determined by the practitioner, in light of factors specific to the subject requiring treatment. Factors that can be taken into account by the practitioner include the severity of the disease state, general health of the subject, age, weight, gender of the subject, diet, time and frequency of administration, drug combination(s), reaction sensitivities, and tolerance/response to therapy. Long-acting pharmaceutical compositions can be administered every 3 to 4 days, every week, or once every two weeks depending on half-life and clearance rate of the particular formulation.

[0391] Normal dosage amounts may vary from 0.1 to 100,000 micrograms, up to a total dose of about 1 g, depending upon the route of administration. Where the therapeutic agent is a protein or antibody of the present invention, the therapeutic protein or antibody agent typically is administered at a daily dosage of 0.01 mg to 30 mg/kg of body weight of the patient (e.g., 1 mg/kg to 5 mg/kg). The pharmaceutical formulation can be administered in multiple doses per day, if desired, to achieve the total desired daily dose.

[0392] Guidance as to particular dosages and methods of delivery is provided in the literature and generally available to practitioners in the art. Those skilled in the art will employ different formulations for nucleotides than for proteins or their inhibitors. Similarly, delivery of polynucleotides or polypeptides will be specific to particular cells, conditions, locations, etc.

[0393] Conventional methods, known to those of ordinary skill in the art of medicine, can be used to administer the pharmaceutical formulation(s) of the present invention to the patient. The pharmaceutical compositions of the present invention can be administered alone, or in combination with other therapeutic agents or interventions.

Therapeutic Methods

[0394] The present invention further provides methods of treating subjects having defects in a gene of the invention, e.g., in expression, activity, distribution, localization, and/or solubility, which can manifest as a disorder of hepatic function. As used herein, “treating” includes all medically-acceptable types of therapeutic intervention, including palliation and prophylaxis (prevention) of disease. The term “treating” encompasses any improvement of a disease, including minor improvements. These methods are discussed below.

[0395] Gene Therapy and Vaccines

[0396] The isolated nucleic acids of the present invention can also be used to drive in vivo expression of the polypeptides of the present invention. In vivo expression can be driven from a vector, typically a viral vector, often a vector based upon a replication incompetent retrovirus, an adenovirus, or an adeno-associated virus (AAV), for the purpose of gene therapy. In vivo expression can also be driven from signals endogenous to the nucleic acid or from a vector, often a plasmid vector, such as pVAX1 (Invitrogen, Carlsbad, Calif., USA), for purpose of “naked” nucleic acid vaccination, as further described in U.S. Pat. Nos. 5,589,466; 5,679,647; 5,804,566; 5,830,877; 5,843,913; 5,880,104; 5,958,891; 5,985,847; 6,017,897; 6,110,898; 6,204,250, the disclosures of which are incorporated herein by reference in their entireties. For cancer therapy, it is preferred that the vector also be tumor-selective. See, e.g., Doronin et al., J. Virol. 75: 3314-24 (2001).

[0397] In another embodiment of the therapeutic methods of the present invention, a therapeutically effective amount of a pharmaceutical composition comprising a nucleic acid molecule of the present invention is administered. The nucleic acid molecule can be delivered in a vector that drives expression of a HSP, fusion protein, or fragment thereof, or without such vector. Nucleic acid compositions that can drive expression of a HSP are administered, for example, to complement a deficiency in the native HSP, or as DNA vaccines. Expression vectors derived from virus, replication deficient retroviruses, adenovirus, adeno-associated (AAV) virus, herpes virus, or vaccinia virus can be used as can plasmids. See, e.g., Cid-Arregui, supra. In a preferred embodiment, the nucleic acid molecule encodes a HSP having the amino acid sequence of SEQ ID NO: 410-611, or a fragment, fusion protein, allelic variant or homolog thereof.

[0398] In still other therapeutic methods of the present invention, pharmaceutical compositions comprising host cells that express a HSP, fusions, or fragments thereof can be administered. In such cases, the cells are typically autologous, so as to circumvent xenogeneic or allotypic rejection, and are administered to complement defects in HSP production or activity. In a preferred embodiment, the nucleic acid molecules in the cells encode a HSP having the amino acid sequence of SEQ ID NO: 410-611, or a fragment, fusion protein, allelic variant or homolog thereof.

[0399] Antisense Administration

[0400] Antisense nucleic acid compositions, or vectors that drive expression of a HSG antisense nucleic acid, are administered to downregulate transcription and/or translation of a HSG in circumstances in which excessive production, or production of aberrant protein, is the pathophysiologic basis of disease.

[0401] Antisense compositions useful in therapy can have a sequence that is complementary to coding or to noncoding regions of a HSG. For example, oligonucleotides derived from the transcription initiation site, e.g., between positions −10 and +10 from the start site, are preferred.

[0402] Catalytic antisense compositions, such as ribozymes, that are capable of sequence-specific hybridization to HSG transcripts, are also useful in therapy. See, e.g., Phylactou, Adv. Drug Deliv. Rev. 44(2-3): 97-108 (2000); Phylactou et al., Hum. Mol. Genet. 7(10): 1649-53 (1998); Rossi, Ciba Found. Symp. 209: 195-204 (1997); and Sigurdsson et al., Trends Biotechnol. 13(8): 286-9 (1995).

[0403] Other nucleic acids useful in the therapeutic methods of the present invention are those that are capable of triplex helix formation in or near the HSG genomic locus. Such triplexing oligonucleotides are able to inhibit transcription. See, e.g., Intody et al., Nucleic Acids Res. 28(21): 4283-90 (2000); and McGuffie et al., Cancer Res. 60(14): 3790-9 (2000). Pharmaceutical compositions comprising such triplex forming oligos (TFOs) are administered in circumstances in which excessive production, or production of aberrant protein, is a pathophysiologic basis of disease.

[0404] In a preferred embodiment, the antisense molecule is derived from a nucleic acid molecule encoding a HSP, preferably a HSP comprising an amino acid sequence of SEQ ID NO: 410-611, or a fragment, allelic variant or homolog thereof. In a more preferred embodiment, the antisense molecule is derived from a nucleic acid molecule having a nucleotide sequence of SEQ ID NO: 1-409, or a part, allelic variant, substantially similar or hybridizing nucleic acid thereof.

[0405] Polypeptide Administration

[0406] In one embodiment of the therapeutic methods of the present invention, a therapeutically effective amount of a pharmaceutical composition comprising a HSP, a fusion protein, fragment, analog or derivative thereof is administered to a subject with a clinically-significant HSP defect.

[0407] Protein compositions are administered, for example, to complement a deficiency in native HSP. In other embodiments, protein compositions are administered as a vaccine to elicit a humoral and/or cellular immune response to HSP. The immune response can be used to modulate activity of HSP or, depending on the immunogen, to immunize against aberrant or aberrantly expressed forms, such as mutant or inappropriately expressed isoforms. In yet other embodiments, protein fusions having a toxic moiety are administered to ablate cells that aberrantly accumulate HSP.

[0408] In a preferred embodiment, the polypeptide administered is a HSP comprising an amino acid sequence of SEQ ID NO: 410-611, or a fusion protein, allelic variant, homolog, analog or derivative thereof. In a more preferred embodiment, the polypeptide is encoded by a nucleic acid molecule having a nucleotide sequence of SEQ ID NO: 1-409, or a part, allelic variant, substantially similar or hybridizing nucleic acid thereof.

[0409] Antibody, Agonist and Antagonist Administration

[0410] In another embodiment of the therapeutic methods of the present invention, a therapeutically effective amount of a pharmaceutical composition comprising an antibody (including fragment or derivative thereof) of the present invention is administered. As is well known, antibody compositions are administered, for example, to antagonize activity of HSP, or to target therapeutic agents to sites of HSP presence and/or accumulation. In a preferred embodiment, the antibody specifically binds to a HSP comprising an amino acid sequence of SEQ ID NO: 410-611, or a fusion protein, allelic variant, homolog, analog or derivative thereof. In a more preferred embodiment, the antibody specifically binds to a HSP encoded by a nucleic acid molecule having a nucleotide sequence of SEQ ID NO: 1-409, or a part, allelic variant, substantially similar or hybridizing nucleic acid thereof.

[0411] The present invention also provides methods for identifying modulators which bind to a HSP or have a modulatory effect on the expression or activity of a HSP. Modulators which decrease the expression or activity of HSP (antagonists) are believed to be useful in treating hepatic cancer. Such screening assays are known to those of skill in the art and include, without limitation, cell-based assays and cell-free assays. Small molecules predicted via computer imaging to specifically bind to regions of a HSP can also be designed, synthesized and tested for use in the imaging and treatment of hepatic cancer. Further, libraries of molecules can be screened for potential anticancer agents by assessing the ability of the molecule to bind to the HSPs identified herein. Molecules identified in the library as being capable of binding to a HSP are key candidates for further evaluation for use in the treatment of hepatic cancer. In a preferred embodiment, these molecules will downregulate expression and/or activity of a HSP in cells.

[0412] In another embodiment of the therapeutic methods of the present invention, a pharmaceutical composition comprising a non-antibody antagonist of HSP is administered. Antagonists of HSP can be produced using methods generally known in the art. In particular, purified HSP can be used to screen libraries of pharmaceutical agents, often combinatorial libraries of small molecules, to identify those that specifically bind and antagonize at least one activity of a HSP.

[0413] In other embodiments a pharmaceutical composition comprising an agonist of a HSP is administered. Agonists can be identified using methods analogous to those used to identify antagonists.

[0414] In a preferred embodiment, the antagonist or agonist specifically binds to and antagonizes or agonizes, respectively, a HSP comprising an amino acid sequence of SEQ ID NO: 410-611, or a fusion protein, allelic variant, homolog, analog or derivative thereof. In a more preferred embodiment, the antagonist or agonist specifically binds to and antagonizes or agonizes, respectively, a HSP encoded by a nucleic acid molecule having a nucleotide sequence of SEQ ID NO: 1-409, or a part, allelic variant, substantially similar or hybridizing nucleic acid thereof.

[0415] Targeting Hepatic Tissue

[0416] The invention also provides a method in which a polypeptide of the invention, or an antibody thereto, is linked to a therapeutic agent such that it can be delivered to the hepatic or to specific cells in the hepatic. In a preferred embodiment, an anti-HSP antibody is linked to a therapeutic agent and is administered to a patient in need of such therapeutic agent. The therapeutic agent may be a toxin, if hepatic tissue needs to be selectively destroyed. This would be useful for targeting and killing hepatic cancer cells. In another embodiment, the therapeutic agent may be a growth or differentiation factor, which would be useful for promoting hepatic cell function.

[0417] In another embodiment, an anti-HSP antibody may be linked to an imaging agent that can be detected using, e.g., magnetic resonance imaging, CT or PET. This would be useful for determining and monitoring hepatic function, identifying hepatic cancer tumors, and identifying noncancerous hepatic diseases.

### EXAMPLES

### Example 1

### Gene Expression Analysis

[0418] Custom CLASP Experiment

[0419] HSGs were identified by a systematic analysis of gene expression data in the LIFESEQ® Gold database available from Incyte Genomics Inc (Palo Alto, Calif.) using the data mining software package CLASP™ (Candidate Lead Automatic Search Program). CLASP™ is a set of algorithms that interrogate Incyte's database to identify genes that are both specific to particular tissue types as well as differentially expressed in tissues from patients with cancer. LifeSeq® Gold contains information about which genes are expressed in various tissues in the body and about the dynamics of expression in both normal and diseased states. CLASP™ first sorts the LifeSeq® Gold database into defined tissue types, such as breast, ovary and prostate. CLASP™ categorizes each tissue sample by disease state. Disease states include “healthy,” “cancer,” “associated with cancer,” “other disease” and “other.” Categorizing the disease states improves our ability to identify tissue and cancer-specific molecular targets. CLASP™ then performs a simultaneous parallel search for genes that are expressed both (1) selectively in the defined tissue type compared to other tissue types and (2) differentially in the “cancer” disease state compared to the other disease states affecting the same, or different, tissues. This sorting is accomplished by using mathematical and statistical filters that specify the minimum change in expression levels and the minimum frequency that the differential expression pattern must be observed across the tissue samples for the gene to be considered statistically significant. The CLASP™ algorithm quantifies the relative abundance of a particular gene in each tissue type and in each disease state.

[0420] To find the HSGs of this invention, the following specific CLASP™ profiles were utilized: tissue-specific expression (CLASP 1), detectable expression only in cancer tissue (CLASP 2), maximal expression in cancer (CLASP 4) and differential expression in cancer tissue (CLASP 5). cDNA libraries were divided into 60 unique tissue types (early versions of LifeSeq® had 48 tissue types). Genes or ESTs were grouped into “gene bins,” where each bin is a cluster of sequences grouped together where they share a common contig. The expression level for each gene bin was calculated for each tissue type. Differential expression significance was calculated with rigorous statistical significant testing taking into account variations in sample size and relative gene abundance in different libraries and within each library (for the equations used to determine statistically significant expression see Audic and Clayerie “The significance of digital gene expression profiles,” Genome Res 7(10): 986-995 (1997), including Equation 1 on page 987 and Equation 2 on page 988, the contents of which are incorporated by reference). Differentially expressed tissue-specific genes were selected based on the percentage abundance level in the targeted tissue versus all the other tissues (tissue-specificity). The expression levels for each gene in libraries of normal tissues or non-tumor tissues from cancer patients were compared with the expression levels in tissue libraries associated with tumor or disease (cancer-specificity). The results were analyzed for statistical significance.

[0421] The selection of the target genes meeting the rigorous CLASP™ profile criteria were as follows:
[0422] (a) CLASP 1: tissue-specific expression: To qualify as a CLASP 1 candidate, a gene must exhibit statistically significant expression in the tissue of interest compared to all other tissues. Only if the gene exhibits such differential expression with a 90% of confidence level is it selected as a CLASP 1 candidate.
[0423] (b) CLASP 2: detectable expression only in cancer tissue: To qualify as a CLASP 2 candidate, a gene must exhibit detectable expression in tumor tissues and undetectable expression in libraries from normal individuals and libraries from normal tissue obtained from diseased patients. In addition, such a gene must also exhibit further specificity for the tumor tissues of interest.
[0424] (c) CLASP 4: maximum differential expression in cancer: To qualify as a CLASP 4 candidate, the lead must exhibit be one of the top50 genes showing maximal differential expression in cancer tissues. In addition, such a gene must also exhibit further specificity for the tumor tissues of interest.
[0425] (d) CLASP 5: differential expression in cancer tissue: To qualify as a CLASP 5 candidate, a gene must be differentially expressed in tumor libraries in the tissue of interest compared to normal libraries for all tissues. Only if the gene exhibits such differential expression with a 90% of confidence level is it selected as a CLASP 5 candidate.
   The CLASP scores for SEQ ID NO: 1-409 are listed below:

[0426] Expression data is not presented for many specific splice variants, however at least one transcript for the splice variant family is supported by expression data shown in the table. Splice variants may share similar regions among various transcripts and therefore data for one variant may be relevant to another. This supporting data is available on request. There are 2 values for each organ in the format 9-0.9999. The first represent the number of occurrences of the gene in the given organ. The 2nd number represents the percentage of the expression of the gene in the given organ.

| DEX0374_1.nt.1 | SEQID | CLASP2 | LIV | | | | |
|---|---|---|---|---|---|---|---|
| | NO. 1 | | .0048 | | | | |
| DEX0374_2.nt.1 | SEQID | CLASP2 | LIV | | | | |
| | NO. 3 | | .0081 | | | | |
| DEX0374_3.nt.1 | SEQID | CLASP5 | LIV | BRN | INS | | |
| | NO. 5 | CLASP1 | .0057 | .0001 | .0019 | | |
| DEX0374_4.nt.1 | SEQID | CLASP2 | LIV | | | | |
| | NO. 30 | | .0081 | | | | |
| DEX0374_5.nt.1 | SEQID | CLASP2 | LIV | | | | |
| | NO. 32 | | .0048 | | | | |
| DEX0374_6.nt.1 | SEQID | CLASP2 | LIV | | | | |
| | NO. 34 | | .0081 | | | | |
| DEX0374_7.nt.1 | SEQID | CLASP1 | LIV | SKN | STO | | |
| | NO. 51 | | .0032 | .0015 | .0021 | | |
| DEX0374_8.nt.1 | SEQID | CLASP2 | LIV | | | | |
| | NO. 53 | | .0081 | | | | |
| DEX0374_8.nt.2 | SEQID | CLASP2 | LIV | | | | |
| | NO. 54 | | .0081 | | | | |
| DEX0374_9.nt.1 | SEQID | CLASP2 | LIV | BRN | | | |
| | NO. 56 | CLASP1 | .0194 | .0001 | | | |
| DEX0374_10.nt.1 | SEQID | CLASP2 | LIV | | | | |
| | NO. 58 | CLASP1 | .0194 | | | | |
| DEX0374_11.nt.1 | SEQID | CLASP2 | LIV | | | | |
| | NO. 60 | | .0081 | | | | |
| DEX0374_12.nt.1 | SEQID | CLASP2 | LIV | | | | |
| | NO. 65 | | .0137 | | | | |
| DEX0374_13.nt.1 | SEQID | CLASP2 | LIV | | | | |
| | NO. 67 | | .0048 | | | | |
| DEX0374_14.nt.1 | SEQID | CLASP2 | LIV | | | | |
| | NO. 69 | | .0129 | | | | |
| DEX0374_15.nt.1 | SEQID | CLASP2 | LIV | | | | |
| | NO. 70 | | .0048 | | | | |
| DEX0374_15.nt.2 | SEQID | CLASP2 | LIV | | | | |
| | NO. 71 | | .0048 | | | | |
| DEX0374_16.nt.1 | SEQID | CLASP1 | LIV | | | | |
| | NO. 73 | | .0032 | | | | |
| DEX0374_16.nt.2 | SEQID | CLASP1 | LIV | | | | |
| | NO. 74 | | .0032 | | | | |
| DEX0374_17.nt.1 | SEQID | CLASP2 | LIV | | | | |
| | NO. 104 | | .0081 | | | | |
| DEX0374_18.nt.1 | SEQID | CLASP2 | LIV | | | | |
| | NO. 113 | | .0081 | | | | |
| DEX0374_18.nt.2 | SEQID | CLASP2 | LIV | | | | |
| | NO. 114 | | .0081 | | | | |
| DEX0374_19.nt.1 | SEQID | CLASP2 | LIV | | | | |
| | NO. 117 | | .0081 | | | | |
| DEX0374_20.nt.1 | SEQID | CLASP2 | LIV | | | | |
| | NO. 119 | | .0137 | | | | |
| DEX0374_20.nt.2 | SEQID | CLASP2 | LIV | | | | |
| | NO. 120 | | .0137 | | | | |
| DEX0374_21.nt.1 | SEQID | CLASP2 | LIV | | | | |
| | NO. 121 | | .0081 | | | | |
| DEX0374_22.nt.1 | SEQID | CLASP2 | LIV | LNG | | | |
| | NO. 123 | | .0048 | .0011 | | | |
| DEX0374_22.nt.2 | SEQID | CLASP2 | LIV | LNG | | | |
| | NO. 124 | | .0048 | .0011 | | | |
| DEX0374_23.nt.1 | SEQID | CLASP2 | LIV | | | | |
| | NO. 126 | | .0048 | | | | |
| DEX0374_23.nt.2 | SEQID | CLASP2 | LIV | | | | |
| | NO. 127 | | .0048 | | | | |
| DEX0374_24.nt.1 | SEQID | CLASP2 | LIV | | | | |
| | NO. 131 | | .0081 | | | | |
| DEX0374_25.nt.1 | SEQID | CLASP2 | LIV | | | | |
| | NO. 134 | | .0129 | | | | |
| DEX0374_26.nt.1 | SEQID | CLASP2 | LIV | FTS | UNC | | |
| | NO. 136 | CLASP1 | .0072 | .0004 | .0011 | | |
| DEX0374_27.nt.1 | SEQID | CLASP5 | LIV | LMN | | | |
| | NO. 137 | CLASP1 | .0057 | .0017 | | | |
| DEX0374_28.nt.1 | SEQID | CLASP1 | LIV | UNC | | | |
| | NO. 139 | | .0043 | .0011 | | | |
| DEX0374_28.nt.2 | SEQID | CLASP1 | LIV | UNC | | | |
| | NO. 140 | | .0043 | .0011 | | | |
| DEX0374_29.nt.1 | SEQID | CLASP2 | LIV | | | | |
| | NO. 142 | | .0048 | | | | |
| DEX0374_29.nt.2 | SEQID | CLASP2 | LIV | | | | |
| | NO. 143 | | .0048 | | | | |
| DEX0374_30.nt.1 | SEQID | CLASP5 | LIV | BLO | PRO | FTS | INL |
| | NO. 145 | CLASP1 | .0057 | .0003 | .0003 | .0004 | .0004 |
| DEX0374_31.nt.1 | SEQID | CLASP2 | LIV | | | | |
| | NO. 147 | | .0081 | | | | |
| DEX0374_31.nt.2 | SEQID | CLASP2 | LIV | | | | |
| | NO. 148 | | .0081 | | | | |
| DEX0374_32.nt.1 | SEQID | CLASP2 | LIV | | | | |
| | NO. 150 | | .0048 | | | | |
| DEX0374_33.nt.1 | SEQID | CLASP5 | LIV | MAM | | | |
| | NO. 152 | CLASP1 | .0057 | .0008 | | | |
| DEX0374_34.nt.1 | SEQID | CLASP2 | LIV | | | | |
| | NO. 154 | | .0048 | | | | |
| DEX0374_35.nt.1 | SEQID | CLASP2 | LIV | | | | |
| | NO. 157 | | .0081 | | | | |
| DEX0374_36.nt.1 | SEQID | CLASP1 | LIV | | | | |
| | NO. 159 | | .0032 | | | | |
| DEX0374_37.nt.1 | SEQID | CLASP2 | LIV | | | | |
| | NO. 162 | | .0048 | | | | |
| DEX0374_38.nt.1 | SEQID | CLASP2 | LIV | INL | | | |
| | NO. 164 | | .0081 | .0027 | | | |
| DEX0374_38.nt.2 | SEQID | CLASP2 | LIV | INL | | | |
| | NO. 165 | | .0081 | .0027 | | | |
| DEX0374_39.nt.1 | SEQID | CLASP1 | LIV | | | | |
| | NO. 167 | | .0065 | | | | |
| DEX0374_39.nt.2 | SEQID | CLASP1 | LIV | | | | |
| | NO. 168 | | .0065 | | | | |
| DEX0374_40.nt.1 | SEQID | CLASP2 | LIV | | | | |
| | NO. 170 | | .0081 | | | | |
| DEX0374_41.nt.1 | SEQID | CLASP2 | LIV | FTS | UNC | | |
| | NO. 172 | CLASP1 | .0072 | .0004 | .0011 | | |
| DEX0374_42.nt.1 | SEQID | CLASP2 | LIV | | | | |
| | NO. 174 | | .0048 | | | | |
| DEX0374_43.nt.1 | SEQID | CLASP2 | LIV | | | | |
| | NO. 176 | | .0081 | | | | |
| DEX0374_43.nt.2 | SEQID | CLASP2 | LIV | | | | |
| | NO. 177 | | .0081 | | | | |
| DEX0374_44.nt.1 | SEQID | CLASP1 | LIV | | | | |
| | NO. 180 | | .0032 | | | | |
| DEX0374_45.nt.1 | SEQID | CLASP2 | LIV | | | | |
| | NO. 182 | | .0081 | | | | |
| DEX0374_46.nt.1 | SEQID | CLASP2 | LIV | BRN | | | |
| | NO. 184 | | .0081 | .0021 | | | |
| DEX0374_47.nt.1 | SEQID | CLASP2 | LIV | THR | BMR | | |
| | NO. 186 | CLASP1 | .0122 | .002 | .0029 | | |
| DEX0374_47.nt.2 | SEQID | CLASP2 | LIV | THR | BMR | | |
| | NO. 187 | CLASP1 | .0122 | .002 | .0029 | | |
| DEX0374_47.nt.3 | SEQID | CLASP2 | LIV | THR | BMR | | |
| | NO. 188 | CLASP1 | .0122 | .002 | .0029 | | |
| DEX0374_48.nt.1 | SEQID | CLASP2 | LIV | | | | |
| | NO. 191 | | .0081 | | | | |
| DEX0374_48.nt.2 | SEQID | CLASP2 | LIV | | | | |
| | NO. 192 | | .0081 | | | | |
| DEX0374_49.nt.1 | SEQID | CLASP2 | LIV | | | | |
| | NO. 194 | | .0048 | | | | |
| DEX0374_50.nt.1 | SEQID | CLASP5 | LIV | | | | |
| | NO. 196 | CLASP1 | .0057 | | | | |
| DEX0374_51.nt.1 | SEQID | CLASP2 | LIV | | | | |
| | NO. 198 | | .0048 | | | | |
| DEX0374_52.nt.1 | SEQID | CLASP2 | LIV | | | | |
| | NO. 201 | | .0081 | | | | |
| DEX0374_53.nt.1 | SEQID | CLASP2 | LIV | BRN | FTS | | |
| | NO. 203 | CLASP1 | .0122 | .0001 | .0001 | | |
| DEX0374_53.nt.2 | SEQID | CLASP2 | LIV | BRN | FTS | | |
| | NO. 204 | CLASP1 | .0122 | .0001 | .0001 | | |
| DEX0374_54.nt.1 | SEQID | CLASP2 | LIV | FTS | | | |
| | NO. 229 | CLASP1 | .0144 | .0001 | | | |
| DEX0374_55.nt.1 | SEQID | CLASP2 | LIV | ADR | | | |
| | NO. 231 | | .0081 | .0034 | | | |
| DEX0374_56.nt.1 | SEQID | CLASP2 | LIV | | | | |
| | NO. 233 | | .0081 | | | | |
| DEX0374_56.nt.2 | SEQID | CLASP2 | LIV | | | | |
| | NO. 234 | | .0081 | | | | |
| DEX0374_57.nt.1 | SEQID | CLASP2 | LIV | | | | |
| | NO. 246 | | .0048 | | | | |
| DEX0374_58.nt.1 | SEQID | CLASP1 | LIV | FTS | | | |
| | NO. 248 | | .0032 | .0001 | | | |
| DEX0374_59.nt.1 | SEQID | CLASP2 | LIV | URE | | | |
| | NO. 250 | | .0081 | .0078 | | | |
| DEX0374_60.nt.1 | SEQID | CLASP5 | LIV | INL | FTS | KID | KID |
| | NO. 252 | CLASP1 | .0132 | .0004 | .0007 | .0012 | .0026 |
| DEX0374_60.nt.2 | SEQID | CLASP5 | LIV | INL | FTS | KID | KID |
| | NO. 253 | CLASP1 | .0132 | .0004 | .0007 | .0012 | .0026 |
| DEX0374_61.nt.1 | SEQID | CLASP5 | LIV | MAM | | | |
| | NO. 255 | CLASP1 | .0057 | .0008 | | | |
| DEX0374_62.nt.1 | SEQID | CLASP2 | LIV | | | | |
| | NO. 257 | | .0129 | | | | |
| DEX0374_63.nt.1 | SEQID | CLASP1 | LIV | FTS | UTR | | |
| | NO. 259 | | .0032 | .0001 | .0004 | | |
| DEX0374_63.nt.2 | SEQID | CLASP1 | LIV | FTS | UTR | | |
| | NO. 260 | | .0032 | .0001 | .0004 | | |
| DEX0374_64.nt.1 | SEQID | CLASP2 | LIV | | | | |
| | NO. 262 | | .0081 | | | | |
| DEX0374_64.nt.2 | SEQID | CLASP2 | LIV | | | | |
| | NO. 263 | | .0081 | | | | |
| DEX0374_65.nt.1 | SEQID | CLASP1 | LIV | BRN | FTS | | |
| | NO. 265 | | .0032 | .0003 | .0005 | | |
| DEX0374_65.nt.2 | SEQID | CLASP1 | LIV | BRN | FTS | | |
| | NO. 266 | | .0032 | .0003 | .0005 | | |
| DEX0374_66.nt.1 | SEQID | CLASP2 | LIV | KID | OVR | GLB | |
| | NO. 268 | CLASP1 | .0122 | .0006 | .0007 | .0041 | |
| DEX0374_67.nt.1 | SEQID | CLASP2 | LIV | MAM | | | |
| | NO. 270 | CLASP1 | .0122 | .0004 | | | |
| DEX0374_68.nt.1 | SEQID | CLASP2 | LIV | | | | |
| | NO. 272 | | .0048 | | | | |
| DEX0374_69.nt.1 | SEQID | CLASP1 | LIV | FTS | BRN | INL | UNC |
| | NO. 274 | | .0032 | .0001 | .0004 | .0008 | .0011 |
| DEX0374_69.nt.2 | SEQID | CLASP1 | LIV | FTS | BRN | INL | UNC |
| | NO. 275 | | .0032 | .0001 | .0004 | .0008 | .0011 |
| DEX0374_70.nt.1 | SEQID | CLASP2 | LIV | | | | |
| | NO. 277 | | .0081 | | | | |
| DEX0374_71.nt.1 | SEQID | CLASP2 | LIV | | | | |
| | NO. 280 | | .0081 | | | | |
| DEX0374_71.nt.2 | SEQID | CLASP2 | LIV | | | | |
| | NO. 281 | | .0081 | | | | |
| DEX0374_72.nt.1 | SEQID | CLASP1 | LIV | | | | |
| | NO. 283 | | .0032 | | | | |
| DEX0374_73.nt.1 | SEQID | CLASP2 | LIV | | | | |
| | NO. 284 | | .0129 | | | | |
| DEX0374_73.nt.2 | SEQID | CLASP5 | | LMN | LNG | SPL | UNC |
| | NO. 285 | | | .0028 | .0034 | .0063 | .016 |
| DEX0374_74.nt.1 | SEQID | CLASP2 | LIV | MAM | | | |
| | NO. 297 | | .0081 | .0019 | | | |
| DEX0374_75.nt.1 | SEQID | CLASP5 | LIV | FTS | INL | CRD | |
| | NO. 299 | CLASP1 | .0094 | .0001 | .0004 | .002 | |
| DEX0374_76.nt.1 | SEQID | CLASP2 | LIV | | | | |
| | NO. 301 | | .0081 | | | | |
| DEX0374_76.nt.2 | SEQID | CLASP2 | LIV | | | | |
| | NO. 302 | | .0081 | | | | |
| DEX0374_77.nt.1 | SEQID | CLASP2 | LIV | | | | |
| | NO. 303 | | .0048 | | | | |
| DEX0374_78.nt.1 | SEQID | CLASP2 | LIV | | | | |
| | NO. 305 | | .0129 | | | | |
| DEX0374_79.nt.1 | SEQID | CLASP2 | LIV | MAM | | | |
| | NO. 307 | | .0129 | .0009 | | | |
| DEX0374_80.nt.1 | SEQID | CLASP1 | LIV | FTS | | | |
| | NO. 309 | | .0032 | .0001 | | | |
| DEX0374_81.nt.1 | SEQID | CLASP1 | LIV | | | | |
| | NO. 329 | | .0032 | | | | |
| DEX0374_82.nt.1 | SEQID | CLASP5 | LIV | FTS | LMN | ESO | GLB |
| | NO. 331 | CLASP1 | .013 | .0005 | .0034 | .0039 | .0041 |
| DEX0374_82.nt.2 | SEQID | CLASP5 | LIV | FTS | LMN | ESO | GLB |
| | NO. 332 | CLASP1 | .013 | .0005 | .0034 | .0039 | .0041 |
| DEX0374_82.nt.3 | SEQID | CLASP5 | LIV | FTS | LMN | ESO | GLB |
| | NO. 333 | CLASP1 | .013 | .0005 | .0034 | .0039 | .0041 |
| DEX0374_82.nt.4 | SEQID | CLASP5 | LIV | FTS | LMN | ESO | GLB |
| | NO. 334 | CLASP1 | .013 | .0005 | .0034 | .0039 | .0041 |
| DEX0374_82.nt.5 | SEQID | CLASP5 | LIV | FTS | LMN | ESO | GLB |
| | NO. 335 | CLASP1 | .013 | .0005 | .0034 | .0039 | .0041 |
| DEX0374_83.nt.1 | SEQID | CLASP2 | LIV | LNG | | | |
| | NO. 341 | | .0081 | .0014 | | | |
| DEX0374_83.nt.2 | SEQID | CLASP2 | LIV | LNG | | | |
| | NO. 342 | | .0081 | .0014 | | | |
| DEX0374_84.nt.1 | SEQID | CLASP2 | LIV | | | | |
| | NO. 344 | | .0048 | | | | |
| DEX0374_85.nt.1 | SEQID | CLASP2 | LIV | | | | |
| | NO. 346 | | .0048 | | | | |
| DEX0374_86.nt.1 | SEQID | CLASP1 | LIV | UNC | | | |
| | NO. 379 | | .0032 | .0011 | | | |
| DEX0374_87.nt.1 | SEQID | CLASP2 | LIV | | | | |
| | NO. 381 | | .0081 | | | | |
| DEX0374_88.nt.1 | SEQID | CLASP2 | LIV | NOS | | | |
| | NO. 383 | | .0081 | .0287 | | | |
| DEX0374_88.nt.2 | SEQID | CLASP5 | | PNS | ESO | | |
| | NO. 384 | | | .0023 | .0102 | | |
| DEX0374_89.nt.1 | SEQID | CLASP2 | LIV | | | | |
| | NO. 387 | | .0129 | | | | |
| DEX0374_90.nt.1 | SEQID | CLASP2 | LIV | | | | |
| | NO. 389 | | .0048 | | | | |
| DEX0374_91.nt.1 | SEQID | CLASP2 | LIV | | | | |
| | NO. 391 | | .0048 | | | | |
| DEX0374_91.nt.2 | SEQID | CLASP2 | LIV | | | | |
| | NO. 392 | | .0048 | | | | |
| DEX0374_92.nt.1 | SEQID | CLASP2 | LIV | LNG | | | |
| | NO. 394 | | .0081 | .001 | | | |
| DEX0374_93.nt.1 | SEQID | CLASP2 | LIV | | | | |
| | NO. 396 | | .0048 | | | | |
| DEX0374_94.nt.1 | SEQID | CLASP2 | LIV | OVR | | | |
| | NO. 398 | | .0065 | .0028 | | | |
| DEX0374_95.nt.1 | SEQID | CLASP2 | LIV | INL | | | |
| | NO. 400 | | .0081 | .0031 | | | |
| DEX0374_96.nt.1 | SEQID | CLASP2 | LIV | FTS | | | |
| | NO. 402 | CLASP1 | .0144 | .0001 | | | |
| DEX0374_97.nt.1 | SEQID | CLASP2 | LIV | FTS | | | |
| | NO. 403 | CLASP1 | .0144 | .0001 | | | |
| DEX0374_98.nt.1 | SEQID | CLASP5 | LIV | BRN | BRN | UTR | UTR |
| | NO. 404 | CLASP1 | .0529 | .0003 | .0004 | .0004 | .0006 |
| | | CLASP4 | | | | | |
| DEX0374_99.nt.1 | SEQID | CLASP1 | LIV | SKN | STO | | |
| | NO. 405 | | .0032 | .0015 | .0021 | | |
| DEX0374_100.nt.1 | SEQID | CLASP2 | LIV | CON | | | |
| | NO. 406 | | .0081 | .0016 | | | |
| DEX0374_101.nt.1 | SEQID | CLASP5 | LIV | THY | PNS | PAN | TST |
| | NO. 407 | CLASP3 | .0019 | .002 | .0023 | .0024 | .0027 |
| DEX0374_102.nt.1 | SEQID | CLASP2 | LIV | | | | |
| | NO. 408 | | .0129 | | | | |
| DEX0374_103.nt.1 | SEQID | CLASP2 | LIV | | | | |
| | NO. 409 | | .0081 | | | | |

Abbreviation for tissues:
ADR Adrenal Glands, BLD Bladder, BLO Blood, BLV Blood Vessels, BRN Brain, CON Connective Tissue, ESO Esophagus, FTS Fetus, INL Intestine, Large, INS Intestine, Small, LNG Lung, MAM Breast, NRV Nervous Tissue, OVR Ovary, PAN Pancreas, PNS Penis, PRO Prostate, SPL Spleen, STO Stomach, SYN Synovial Membranes, THR Thyroid Gland, THY Thymus Gland, UNC Mixed Tissues, UTR Uterus

[0427] The mapping of the nucleic acid (“NT”) SEQ ID NO; DEX ID; chromosomal location (if known); open reading frame (ORF) location; amino acid (“AA”) SEQ ID NO and AA DEX ID are shown in the table below:

| NT | | Chromo | | AA | |
|---|---|---|---|---|---|
| SEQ_No | NT_SEQID | Map | ORF_Loc | SEQ_NO | AA_SEQID |
| 1 | DEX0374_1.nt.1 | 13q14.11 | | | |
| 2 | DEX0374_1.nt.2 | 13q14.11 | — | | |
| 3 | DEX0374_2.nt.1 | * | | 410 | DEX0374_2.aa.1 |
| 4 | DEX0374_2.nt.2 | * | — | | |
| 5 | DEX0374_3.nt.1 | 7p14.1 | | 411 | DEX0374_3.aa.1 |
| 6 | DEX0374_3.nt.2 | 7p14.1 | 29-2594 | 412 | DEX0374_3.aa.2 |
| 7 | DEX0374_3.nt.3 | 7p14.1 | — | | |
| 8 | DEX0374_3.nt.4 | 7p14.1 | 29-2594 | 412 | DEX0374_3.aa.2 |
| 9 | DEX0374_3.nt.5 | 7p14.1 | 29-2594 | 412 | DEX0374_3.aa.2 |
| 10 | DEX0374_3.nt.6 | 7p14.1 | 232-1410 | 413 | DEX0374_3.aa.6 |
| 11 | DEX0374_3.nt.7 | 7p14.1 | — | | |
| 12 | DEX0374_3.nt.8 | 7p14.1 | — | | |
| 13 | DEX0374_3.nt.9 | 7p14.1 | 29-2438 | 414 | DEX0374_3.aa.9 |
| 14 | DEX0374_3.nt.10 | 7p14.1 | — | | |
| 15 | DEX0374_3.nt.11 | 7p14.1 | 29-2594 | 412 | DEX0374_3.aa.2 |
| 16 | DEX0374_3.nt.12 | 7p14.1 | 29-2555 | 415 | DEX0374_3.aa.12 |
| 17 | DEX0374_3.nt.13 | 7p14.1 | 29-2358 | 416 | DEX0374_3.aa.13 |
| 18 | DEX0374_3.nt.14 | 7p14.1 | 29-1277 | 417 | DEX0374_3.aa.14 |
| 19 | DEX0374_3.nt.15 | 7p14.1 | 29-1070 | 418 | DEX0374_3.aa.15 |
| 20 | DEX0374_3.nt.16 | 7p14.1 | 29-506 | 419 | DEX0374_3.aa.16 |
| 21 | DEX0374_3.nt.17 | 7p14.1 | — | | |
| 22 | DEX0374_3.nt.18 | 7p14.1 | 29-2594 | 412 | DEX0374_3.aa.2 |
| 23 | DEX0374_3.nt.19 | 7p14.1 | 466-2805 | 420 | DEX0374_3.aa.19 |
| 24 | DEX0374_3.nt.20 | 7p14.1 | 29-2594 | 412 | DEX0374_3.aa.2 |
| 25 | DEX0374_3.nt.21 | 7p14.1 | 29-2594 | 412 | DEX0374_3.aa.2 |
| 26 | DEX0374_3.nt.22 | 7p14.1 | 29-2651 | 421 | DEX0374_3.aa.22 |
| 27 | DEX0374_3.nt.23 | 7p14.1 | 29-2510 | 422 | DEX0374_3.aa.23 |
| 28 | DEX0374_3.nt.24 | 7p14.1 | 29-1583 | 423 | DEX0374_3.aa.24 |
| 29 | DEX0374_3.nt.25 | 7p14.1 | 29-839 | 424 | DEX0374_3.aa.25 |
| 30 | DEX0374_4.nt.1 | 3p26.2 | | 425 | DEX0374_4.aa.1 |
| 31 | DEX0374_4.nt.2 | 3p26.2 | — | | |
| 32 | DEX0374_5.nt.1 | 10q22.3 | | 426 | DEX0374_5.aa.1 |
| 33 | DEX0374_5.nt.2 | 10q22.3 | — | | |
| 34 | DEX0374_6.nt.1 | 13q12.11 | | | |
| 35 | DEX0374_6.nt.2 | 13q12.11 | — | | |
| 36 | DEX0374_6.nt.3 | 13q12.11 | 1-173 | 427 | DEX0374_6.aa.3 |
| 37 | DEX0374_6.nt.4 | 13q12.11 | — | | |
| 38 | DEX0374_6.nt.5 | 13q12.11 | 70-1023 | 428 | DEX0374_6.aa.5 |
| 39 | DEX0374_6.nt.6 | 13q12.11 | — | | |
| 40 | DEX0374_6.nt.7 | 13q12.11 | — | | |
| 41 | DEX0374_6.nt.8 | 13q12.11 | — | | |
| 42 | DEX0374_6.nt.9 | 13q12.11 | — | | |
| 43 | DEX0374_6.nt.10 | 13q12.11 | 70-1344 | 429 | DEX0374_6.aa.10 |
| 44 | DEX0374_6.nt.11 | 13q12.11 | 70-1053 | 430 | DEX0374_6.aa.11 |
| 45 | DEX0374_6.nt.12 | 13q12.11 | 70-681 | 431 | DEX0374_6.aa.12 |
| 46 | DEX0374_6.nt.13 | 13q12.11 | — | | |
| 47 | DEX0374_6.nt.14 | 13q12.11 | — | | |
| 48 | DEX0374_6.nt.15 | 13q12.11 | 1-533 | 432 | DEX0374_6.aa.15 |
| 49 | DEX0374_6.nt.16 | 13q12.11 | 70-1401 | 433 | DEX0374_6.aa.16 |
| 50 | DEX0374_6.nt.17 | 13q12.11 | 70-1218 | 434 | DEX0374_6.aa.17 |
| 51 | DEX0374_7.nt.1 | 1p32.2 | | 435 | DEX0374_7.aa.1 |
| 52 | DEX0374_7.nt.2 | 1p32.2 | — | | |
| 53 | DEX0374_8.nt.1 | 3q29 | | 436 | DEX0374_8.aa.1 |
| 54 | DEX0374_8.nt.2 | 3q29 | | | |
| 55 | DEX0374_8.nt.3 | 3q29 | — | | |
| 56 | DEX0374_9.nt.1 | 1p32.3 | | 437 | DEX0374_9.aa.1 |
| 57 | DEX0374_9.nt.2 | 1p32.3 | — | | |
| 58 | DEX0374_10.nt.1 | 7q33 | | 438 | DEX0374_10.aa.1 |
| 59 | DEX0374_10.nt.2 | 7q33 | — | | |
| 60 | DEX0374_11.nt.1 | 5q12.3 | | 439 | DEX0374_11.aa.1 |
| 61 | DEX0374_11.nt.2 | 5q12.3 | — | | |
| 62 | DEX0374_11.nt.3 | 5q12.3 | — | | |
| 63 | DEX0374_11.nt.4 | 5q12.3 | — | | |
| 64 | DEX0374_11.nt.5 | 5q12.3 | — | | |
| 65 | DEX0374_12.nt.1 | 3p22.1 | | 440 | DEX0374_12.aa.1 |
| 66 | DEX0374_12.nt.2 | 3p22.1 | — | | |
| 67 | DEX0374_13.nt.1 | 6q14.1 | | 441 | DEX0374_13.aa.1 |
| 68 | DEX0374_13.nt.2 | 6q14.1 | — | | |
| 69 | DEX0374_14.nt.1 | 14q22.2 | | 442 | DEX0374_14.aa.1 |
| 70 | DEX0374_15.nt.1 | 1q24.3 | | 443 | DEX0374_15.aa.1 |
| 71 | DEX0374_15.nt.2 | 1q24.3 | | | |
| 72 | DEX0374_15.nt.3 | 1q24.3 | — | | |
| 73 | DEX0374_16.nt.1 | 14q13.2 | | 444 | DEX0374_16.aa.1 |
| 74 | DEX0374_16.nt.2 | 14q13.2 | | | |
| 75 | DEX0374_16.nt.3 | * | — | | |
| 76 | DEX0374_16.nt.4 | * | 73-2941 | 445 | DEX0374_16.aa.4 |
| 77 | DEX0374_16.nt.5 | * | — | | |
| 78 | DEX0374_16.nt.6 | * | 73-5737 | 446 | DEX0374_16.aa.6 |
| 79 | DEX0374_16.nt.7 | * | 513-4881 | 447 | DEX0374_16.aa.7 |
| 80 | DEX0374_16.nt.8 | * | 73-5389 | 448 | DEX0374_16.aa.8 |
| 81 | DEX0374_16.nt.9 | * | 16-4229 | 449 | DEX0374_16.aa.9 |
| 82 | DEX0374_16.nt.10 | * | 73-5737 | 446 | DEX0374_16.aa.6 |
| 83 | DEX0374_16.nt.11 | * | 73-5803 | 450 | DEX0374_16.aa.11 |
| 84 | DEX0374_16.nt.12 | * | 73-5737 | 446 | DEX0374_16.aa.6 |
| 85 | DEX0374_16.nt.13 | * | — | | |
| 86 | DEX0374_16.nt.14 | * | — | | |
| 87 | DEX0374_16.nt.15 | * | 73-5737 | 446 | DEX0374_16.aa.6 |
| 88 | DEX0374_16.nt.16 | * | 73-5186 | 451 | DEX0374_16.aa.16 |
| 89 | DEX0374_16.nt.17 | * | 73-3793 | 452 | DEX0374_16.aa.17 |
| 90 | DEX0374_16.nt.18 | * | 73-2623 | 453 | DEX0374_16.aa.18 |
| 91 | DEX0374_16.nt.19 | * | — | | |
| 92 | DEX0374_16.nt.20 | * | 73-928 | 454 | DEX0374_16.aa.20 |
| 93 | DEX0374_16.nt.21 | * | 73-1897 | 455 | DEX0374_16.aa.21 |
| 94 | DEX0374_16.nt.22 | * | 73-5878 | 456 | DEX0374_16.aa.22 |
| 95 | DEX0374_16.nt.23 | * | 572-4235 | 457 | DEX0374_16.aa.23 |
| 96 | DEX0374_16.nt.24 | * | 73-3454 | 458 | DEX0374_16.aa.24 |
| 97 | DEX0374_16.nt.25 | * | 73-5758 | 459 | DEX0374_16.aa.25 |
| 98 | DEX0374_16.nt.26 | * | 73-5677 | 460 | DEX0374_16.aa.26 |
| 99 | DEX0374_16.nt.27 | * | 73-5794 | 461 | DEX0374_16.aa.27 |
| 100 | DEX0374_16.nt.28 | * | 73-5743 | 462 | DEX0374_16.aa.28 |
| 101 | DEX0374_16.nt.29 | * | 73-2657 | 463 | DEX0374_16.aa.29 |
| 102 | DEX0374_16.nt.30 | * | 73-1366 | 464 | DEX0374_16.aa.30 |
| 103 | DEX0374_16.nt.31 | * | 73-1324 | 465 | DEX0374_16.aa.31 |
| 104 | DEX0374_17.nt.1 | 16q21 | | 466 | DEX0374_17.aa.1 |
| 105 | DEX0374_17.nt.2 | 16q21 | — | | |
| 106 | DEX0374_17.nt.3 | 16q21 | 301-898 | 467 | DEX0374_17.aa.3 |
| 107 | DEX0374_17.nt.4 | 16q21 | 66-867 | 468 | DEX0374_17.aa.4 |
| 108 | DEX0374_17.nt.5 | 16q21 | 301-1054 | 469 | DEX0374_17.aa.5 |
| 109 | DEX0374_17.nt.6 | 16q21 | 43-310 | 470 | DEX0374_17.aa.6 |
| 110 | DEX0374_17.nt.7 | 16q21 | 301-823 | 471 | DEX0374_17.aa.7 |
| 111 | DEX0374_17.nt.8 | 16q21 | 301-823 | 471 | DEX0374_17.aa.7 |
| 112 | DEX0374_17.nt.9 | 16q21 | 392-725 | 472 | DEX0374_17.aa.9 |
| 113 | DEX0374_18.nt.1 | 14q32.32 | | 473 | DEX0374_18.aa.1 |
| 114 | DEX0374_18.nt.2 | 14q32.32 | | | |
| 115 | DEX0374_18.nt.3 | 14q32.32 | — | | |
| 116 | DEX0374_18.nt.4 | * | — | | |
| 117 | DEX0374_19.nt.1 | 14q32.32 | | 474 | DEX0374_19.aa.1 |
| 118 | DEX0374_19.nt.2 | 14q32.32 | — | | |
| 119 | DEX0374_20.nt.1 | 2q31.1 | | 475 | DEX0374_20.aa.1 |
| 120 | DEX0374_20.nt.2 | 2q31.1 | | | |
| 121 | DEX0374_21.nt.1 | 10p12.33 | | 476 | DEX0374_21.aa.1 |
| 122 | DEX0374_21.nt.2 | 10p12.33 | — | | |
| 123 | DEX0374_22.nt.1 | 11p13 | | 477 | DEX0374_22.aa.1 |
| 124 | DEX0374_22.nt.2 | 11p13 | | | |
| 125 | DEX0374_22.nt.3 | 11p13 | — | | |
| 126 | DEX0374_23.nt.1 | 1q31.3 | | 478 | DEX0374_23.aa.1 |
| 127 | DEX0374_23.nt.2 | 1q31.3 | | | |
| 128 | DEX0374_23.nt.3 | 1q31.3 | — | | |
| 129 | DEX0374_23.nt.4 | 1q31.3 | — | | |
| 130 | DEX0374_23.nt.5 | 1q31.3 | — | | |
| 131 | DEX0374_24.nt.1 | 16p13.3 | | 479 | DEX0374_24.aa.1 |
| 132 | DEX0374_24.nt.2 | 16p13.3 | 629-1727 | 480 | DEX0374_24.aa.2 |
| 133 | DEX0374_24.nt.3 | 16p13.3 | 1215-2214 | 481 | DEX0374_24.aa.3 |
| 134 | DEX0374_25.nt.1 | * | | 482 | DEX0374_25.aa.1 |
| 135 | DEX0374_25.nt.2 | * | — | | |
| 136 | DEX0374_26.nt.1 | Xp11.23 | | | |
| 137 | DEX0374_27.nt.1 | 16q24.3 | | 483 | DEX0374_27.aa.1 |
| 138 | DEX0374_27.nt.2 | 16q24.3 | 1-199 | 484 | DEX0374_27.aa.2 |
| 139 | DEX0374_28.nt.1 | 10p12.1 | | 485 | DEX0374_28.aa.1 |
| 140 | DEX0374_28.nt.2 | 10p12.1 | | | |
| 141 | DEX0374_28.nt.3 | 10p12.1 | — | | |
| 142 | DEX0374_29.nt.1 | 2p13.1 | | 486 | DEX0374_29.aa.1 |
| 143 | DEX0374_29.nt.2 | 2p13.1 | | | |
| 144 | DEX0374_29.nt.3 | 2p13.1 | — | | |
| 145 | DEX0374_30.nt.1 | 1q23.3 | | 487 | DEX0374_30.aa.1 |
| 146 | DEX0374_30.nt.2 | 1q23.3 | — | | |
| 147 | DEX0374_31.nt.1 | 1p34.3 | | 488 | DEX0374_31.aa.1 |
| 148 | DEX0374_31.nt.2 | 1p34.3 | | | |
| 149 | DEX0374_31.nt.3 | 1p34.3 | — | | |
| 150 | DEX0374_32.nt.1 | Xp21.1 | | 489 | DEX0374_32.aa.1 |
| 151 | DEX0374_32.nt.2 | Xp21.1 | — | | |
| 152 | DEX0374_33.nt.1 | 1q31.3 | | 490 | DEX0374_33.aa.1 |
| 153 | DEX0374_33.nt.2 | 1q31.3 | — | | |
| 154 | DEX0374_34.nt.1 | 6p22.2 | | 491 | DEX0374_34.aa.1 |
| 155 | DEX0374_34.nt.2 | 6p22.2 | — | | |
| 156 | DEX0374_34.nt.3 | 6p22.2 | — | | |
| 157 | DEX0374_35.nt.1 | 16q13 | | 492 | DEX0374_35.aa.1 |
| 158 | DEX0374_35.nt.2 | 16q13 | 75-546 | 493 | DEX0374_35.aa.2 |
| 159 | DEX0374_36.nt.1 | 12q23.3 | | 494 | DEX0374_36.aa.1 |
| 160 | DEX0374_36.nt.2 | 12q23.3 | — | | |
| 161 | DEX0374_36.nt.3 | * | — | | |
| 162 | DEX0374_37.nt.1 | 18q12.3 | | 495 | DEX0374_37.aa.1 |
| 163 | DEX0374_37.nt.2 | 18q12.3 | — | | |
| 164 | DEX0374_38.nt.1 | 17q21.31 | | 496 | DEX0374_38.aa.1 |
| 165 | DEX0374_38.nt.2 | 17q21.31 | | | |
| 166 | DEX0374_38.nt.3 | 17q21.31 | — | | |
| 167 | DEX0374_39.nt.1 | 20q11.23 | | 497 | DEX0374_39.aa.1 |
| 168 | DEX0374_39.nt.2 | 20q11.23 | | | |
| 169 | DEX0374_39.nt.3 | 20q11.23 | 1-134 | 498 | DEX0374_39.aa.3 |
| 170 | DEX0374_40.nt.1 | 14q23.3 | | 499 | DEX0374_40.aa.1 |
| 171 | DEX0374_40.nt.2 | 14q23.3 | — | | |
| 172 | DEX0374_41.nt.1 | * | | 500 | DEX0374_41.aa.1 |
| 173 | DEX0374_41.nt.2 | * | — | | |
| 174 | DEX0374_42.nt.1 | 14q23.3 | | 501 | DEX0374_42.aa.1 |
| 175 | DEX0374_42.nt.2 | 14q23.3 | — | | |
| 176 | DEX0374_43.nt.1 | * | | 502 | DEX0374_43.aa.1 |
| 177 | DEX0374_43.nt.2 | * | | | |
| 178 | DEX0374_43.nt.3 | * | 179-560 | 503 | DEX0374_43.aa.3 |
| 179 | DEX0374_43.nt.4 | * | — | | |
| 180 | DEX0374_44.nt.1 | 16p12.3 | | 504 | DEX0374_44.aa.1 |
| 181 | DEX0374_44.nt.2 | 16p12.3 | — | | |
| 182 | DEX0374_45.nt.1 | 5q31.1 | | 505 | DEX0374_45.aa.1 |
| 183 | DEX0374_45.nt.2 | 5q31.1 | 157-583 | 506 | DEX0374_45.aa.2 |
| 184 | DEX0374_46.nt.1 | * | | 507 | DEX0374_46.aa.1 |
| 185 | DEX0374_46.nt.2 | * | — | | |
| 186 | DEX0374_47.nt.1 | 6q25.1 | | 508 | DEX0374_47.aa.1 |
| 187 | DEX0374_47.nt.2 | 6q25.1 | | 509 | DEX0374_47.aa.2 |
| 188 | DEX0374_47.nt.3 | 6q25.1 | | | |
| 189 | DEX0374_47.nt.4 | 6q25.1 | — | | |
| 190 | DEX0374_47.nt.5 | 6q25.1 | — | | |
| 191 | DEX0374_48.nt.1 | * | | 510 | DEX0374_48.aa.1 |
| 192 | DEX0374_48.nt.2 | * | | | |
| 193 | DEX0374_48.nt.3 | * | — | | |
| 194 | DEX0374_49.nt.1 | 18q12.3 | | 511 | DEX0374_49.aa.1 |
| 195 | DEX0374_49.nt.2 | 18q12.3 | — | | |
| 196 | DEX0374_50.nt.1 | 20q11.23 | | 512 | DEX0374_50.aa.1 |
| 197 | DEX0374_50.nt.2 | 20q11.23 | — | | |
| 198 | DEX0374_51.nt.1 | 2p23.3 | | 513 | DEX0374_51.aa.1 |
| 199 | DEX0374_51.nt.2 | 2p23.3 | — | | |
| 200 | DEX0374_51.nt.3 | 2p23.3 | — | | |
| 201 | DEX0374_52.nt.1 | 13q12.11 | | | |
| 202 | DEX0374_52.nt.2 | 13q12.11 | — | | |
| 203 | DEX0374_53.nt.1 | * | | 514 | DEX0374_53.aa.1 |
| 204 | DEX0374_53.nt.2 | * | | | |
| 205 | DEX0374_53.nt.3 | 16p11.2 | 82-2981 | 515 | DEX0374_53.aa.3 |
| 206 | DEX0374_53.nt.4 | 16p11.2 | 1-608 | 516 | DEX0374_53.aa.4 |
| 207 | DEX0374_53.nt.5 | 16p11.2 | — | | |
| 208 | DEX0374_53.nt.6 | 16p11.2 | 681-991 | 517 | DEX0374_53.aa.6 |
| 209 | DEX0374_53.nt.7 | 16p11.2 | 82-2958 | 518 | DEX0374_53.aa.7 |
| 210 | DEX0374_53.nt.8 | 16p11.2 | 82-2596 | 519 | DEX0374_53.aa.8 |
| 211 | DEX0374_53.nt.9 | 16p11.2 | 82-2596 | 519 | DEX0374_53.aa.8 |
| 212 | DEX0374_53.nt.10 | 16p11.2 | 91-1503 | 520 | DEX0374_53.aa.10 |
| 213 | DEX0374_53.nt.11 | 16p11.2 | 322-1079 | 521 | DEX0374_53.aa.11 |
| 214 | DEX0374_53.nt.12 | 16p11.2 | 82-2164 | 522 | DEX0374_53.aa.12 |
| 215 | DEX0374_53.nt.13 | 16p11.2 | 82-2176 | 523 | DEX0374_53.aa.13 |
| 216 | DEX0374_53.nt.14 | 16p11.2 | 133-889 | 524 | DEX0374_53.aa.14 |
| 217 | DEX0374_53.nt.15 | 16p11.2 | 82-1789 | 525 | DEX0374_53.aa.15 |
| 218 | DEX0374_53.nt.16 | 16p11.2 | 133-912 | 526 | DEX0374_53.aa.16 |
| 219 | DEX0374_53.nt.17 | 16p11.2 | 91-470 | 527 | DEX0374_53.aa.17 |
| 220 | DEX0374_53.nt.18 | 16p11.2 | 1-680 | 528 | DEX0374_53.aa.18 |
| 221 | DEX0374_53.nt.19 | 16p11.2 | 82-2836 | 529 | DEX0374_53.aa.19 |
| 222 | DEX0374_53.nt.20 | 16p11.2 | 82-2638 | 530 | DEX0374_53.aa.20 |
| 223 | DEX0374_53.nt.21 | 16p11.2 | 82-2861 | 531 | DEX0374_53.aa.21 |
| 224 | DEX0374_53.nt.22 | 16p11.2 | 82-3118 | 532 | DEX0374_53.aa.22 |
| 225 | DEX0374_53.nt.23 | 16p11.2 | 46-1018 | 533 | DEX0374_53.aa.23 |
| 226 | DEX0374_53.nt.24 | 16p11.2 | 1536-1844 | 517 | DEX0374_53.aa.6 |
| 227 | DEX0374_53.nt.25 | * | 196-1003 | 534 | DEX0374_53.aa.25 |
| 228 | DEX0374_53.nt.26 | * | 16-989 | 535 | DEX0374_53.aa.26 |
| 229 | DEX0374_54.nt.1 | 6q22.1 | | 536 | DEX0374_54.aa.1 |
| 230 | DEX0374_54.nt.2 | 6q22.1 | — | | |
| 231 | DEX0374_55.nt.1 | 9q31.1 | | 537 | DEX0374_55.aa.1 |
| 232 | DEX0374_55.nt.2 | 9q31.1 | — | | |
| 233 | DEX0374_56.nt.1 | 7q36.1 | | 538 | DEX0374_56.aa.1 |
| 234 | DEX0374_56.nt.2 | 7q36.1 | | | |
| 235 | DEX0374_56.nt.3 | 7q36.1 | 1-361 | 539 | DEX0374_56.aa.3 |
| 236 | DEX0374_56.nt.4 | 7q36.1 | 366-1980 | 540 | DEX0374_56.aa.4 |
| 237 | DEX0374_56.nt.5 | 7q36.1 | 335-1949 | 540 | DEX0374_56.aa.4 |
| 238 | DEX0374_56.nt.6 | 7q36.1 | 126-1740 | 540 | DEX0374_56.aa.4 |
| 239 | DEX0374_56.nt.7 | 7q36.1 | 126-1740 | 540 | DEX0374_56.aa.4 |
| 240 | DEX0374_56.nt.8 | 7q36.1 | — | | |
| 241 | DEX0374_56.nt.9 | 7q36.1 | 487-694 | 541 | DEX0374_56.aa.9 |
| 242 | DEX0374_56.nt.10 | 7q36.1 | 126-1740 | 540 | DEX0374_56.aa.4 |
| 243 | DEX0374_56.nt.11 | 7q36.1 | 487-2101 | 540 | DEX0374_56.aa.4 |
| 244 | DEX0374_56.nt.12 | 7q36.1 | 132-1785 | 542 | DEX0374_56.aa.12 |
| 245 | DEX0374_56.nt.13 | 7q36.1 | 126-723 | 543 | DEX0374_56.aa.13 |
| 246 | DEX0374_57.nt.1 | 6q22.1 | | 544 | DEX0374_57.aa.1 |
| 247 | DEX0374_57.nt.2 | 6q22.1 | — | | |
| 248 | DEX0374_58.nt.1 | 13q34 | | 545 | DEX0374_58.aa.1 |
| 249 | DEX0374_58.nt.2 | 13q34 | — | | |
| 250 | DEX0374_59.nt.1 | 3p14.1 | | 546 | DEX0374_59.aa.1 |
| 251 | DEX0374_59.nt.2 | 3p14.1 | — | | |
| 252 | DEX0374_60.nt.1 | 10q11.23 | | 547 | DEX0374_60.aa.1 |
| 253 | DEX0374_60.nt.2 | 10q11.23 | | | |
| 254 | DEX0374_60.nt.3 | 10q11.23 | 22-371 | 548 | DEX0374_60.aa.3 |
| 255 | DEX0374_61.nt.1 | 1q31.3 | | 549 | DEX0374_61.aa.1 |
| 256 | DEX0374_61.nt.2 | 1q31.3 | — | | |
| 257 | DEX0374_62.nt.1 | 17q25.3 | | 550 | DEX0374_62.aa.1 |
| 258 | DEX0374_62.nt.2 | 17q25.3 | — | | |
| 259 | DEX0374_63.nt.1 | 1q25.1 | | 551 | DEX0374_63.aa.1 |
| 260 | DEX0374_63.nt.2 | 1q25.1 | | | |
| 261 | DEX0374_63.nt.3 | 1q25.1 | — | | |
| 262 | DEX0374_64.nt.1 | 14q12 | | 552 | DEX0374_64.aa.1 |
| 263 | DEX0374_64.nt.2 | 14q12 | | | |
| 264 | DEX0374_64.nt.3 | 14q12 | — | | |
| 265 | DEX0374_65.nt.1 | 16p12.1 | | 553 | DEX0374_65.aa.1 |
| 266 | DEX0374_65.nt.2 | 16p12.1 | | | |
| 267 | DEX0374_65.nt.3 | 16p12.1 | — | | |
| 268 | DEX0374_66.nt.1 | 16q13 | | 554 | DEX0374_66.aa.1 |
| 269 | DEX0374_66.nt.2 | 16q13 | — | | |
| 270 | DEX0374_67.nt.1 | 19q13.31 | | 555 | DEX0374_67.aa.1 |
| 271 | DEX0374_67.nt.2 | 19q13.31 | — | | |
| 272 | DEX0374_68.nt.1 | 3q29 | | 556 | DEX0374_68.aa.1 |
| 273 | DEX0374_68.nt.2 | 3q29 | — | | |
| 274 | DEX0374_69.nt.1 | 8q12.3 | | 557 | DEX0374_69.aa.1 |
| 275 | DEX0374_69.nt.2 | 8q12.3 | | | |
| 276 | DEX0374_69.nt.3 | 8q12.3 | — | | |
| 277 | DEX0374_70.nt.1 | 5q33.1 | | 558 | DEX0374_70.aa.1 |
| 278 | DEX0374_70.nt.2 | 5q33.1 | 1-180 | 559 | DEX0374_70.aa.2 |
| 279 | DEX0374_70.nt.3 | 5q33.1 | 1-168 | 560 | DEX0374_70.aa.3 |
| 280 | DEX0374_71.nt.1 | 16q13 | | 561 | DEX0374_71.aa.1 |
| 281 | DEX0374_71.nt.2 | 16q13 | | | |
| 282 | DEX0374_71.nt.3 | 16q13 | — | | |
| 283 | DEX0374_72.nt.1 | 6p21.1 | | 562 | DEX0374_72.aa.1 |
| 284 | DEX0374_73.nt.1 | 12p13.33 | | 563 | DEX0374_73.aa.1 |
| 285 | DEX0374_73.nt.2 | 12p13.33 | | | |
| 286 | DEX0374_73.nt.3 | 12p13.33 | 1-966 | 564 | DEX0374_73.aa.3 |
| 287 | DEX0374_73.nt.4 | 12p13.33 | 1-966 | 564 | DEX0374_73.aa.3 |
| 288 | DEX0374_73.nt.5 | 12p13.33 | 1-966 | 564 | DEX0374_73.aa.3 |
| 289 | DEX0374_73.nt.6 | 12p13.33 | 1-966 | 564 | DEX0374_73.aa.3 |
| 290 | DEX0374_73.nt.7 | 12p13.33 | 1-966 | 564 | DEX0374_73.aa.3 |
| 291 | DEX0374_73.nt.8 | 12p13.33 | 737-1187 | 565 | DEX0374_73.aa.8 |
| 292 | DEX0374_73.nt.9 | 12p13.33 | 592-1756 | 566 | DEX0374_73.aa.9 |
| 293 | DEX0374_73.nt.10 | 12p13.33 | — | | |
| 294 | DEX0374_73.nt.11 | 12p13.33 | 1-97 | 567 | DEX0374_73.aa.11 |
| 295 | DEX0374_73.nt.12 | 12p13.33 | 592-1129 | 568 | DEX0374_73.aa.12 |
| 296 | DEX0374_73.nt.13 | 12p13.33 | — | | |
| 297 | DEX0374_74.nt.1 | 1q32.1 | | 569 | DEX0374_74.aa.1 |
| 298 | DEX0374_74.nt.2 | 1q32.1 | — | | |
| 299 | DEX0374_75.nt.1 | 11q23.2 | | | |
| 300 | DEX0374_75.nt.2 | 11q23.2 | — | | |
| 301 | DEX0374_76.nt.1 | 3q29 | | 570 | DEX0374_76.aa.1 |
| 302 | DEX0374_76.nt.2 | 3q29 | | | |
| 303 | DEX0374_77.nt.1 | 11q21 | | 571 | DEX0374_77.aa.1 |
| 304 | DEX0374_77.nt.2 | 11q21 | — | | |
| 305 | DEX0374_78.nt.1 | 9p21.2 | | 572 | DEX0374_78.aa.1 |
| 306 | DEX0374_78.nt.2 | * | — | | |
| 307 | DEX0374_79.nt.1 | 3q29 | | 573 | DEX0374_79.aa.1 |
| 308 | DEX0374_79.nt.2 | 3q29 | — | | |
| 309 | DEX0374_80.nt.1 | 13q14.13 | | 574 | DEX0374_80.aa.1 |
| 310 | DEX0374_80.nt.2 | * | 228-2415 | 575 | DEX0374_80.aa.2 |
| 311 | DEX0374_80.nt.3 | * | — | | |
| 312 | DEX0374_80.nt.4 | * | — | | |
| 313 | DEX0374_80.nt.5 | * | 228-2193 | 576 | DEX0374_80.aa.5 |
| 314 | DEX0374_80.nt.6 | * | — | | |
| 315 | DEX0374_80.nt.7 | * | 228-2319 | 577 | DEX0374_80.aa.7 |
| 316 | DEX0374_80.nt.8 | * | 31-209 | 578 | DEX0374_80.aa.8 |
| 317 | DEX0374_80.nt.9 | * | — | | |
| 318 | DEX0374_80.nt.10 | * | 1-198 | 579 | DEX0374_80.aa.10 |
| 319 | DEX0374_80.nt.11 | * | 228-2319 | 577 | DEX0374_80.aa.7 |
| 320 | DEX0374_80.nt.12 | * | — | | |
| 321 | DEX0374_80.nt.13 | * | 228-1839 | 580 | DEX0374_80.aa.13 |
| 322 | DEX0374_80.nt.14 | * | 228-1182 | 581 | DEX0374_80.aa.14 |
| 323 | DEX0374_80.nt.15 | * | 228-2319 | 577 | DEX0374_80.aa.7 |
| 324 | DEX0374_80.nt.16 | * | 73-612 | 582 | DEX0374_80.aa.16 |
| 325 | DEX0374_80.nt.17 | * | 228-2319 | 577 | DEX0374_80.aa.7 |
| 326 | DEX0374_80.nt.18 | * | 228-462 | 583 | DEX0374_80.aa.18 |
| 327 | DEX0374_80.nt.19 | * | 228-1737 | 584 | DEX0374_80.aa.19 |
| 328 | DEX0374_80.nt.20 | * | 228-684 | 585 | DEX0374_80.aa.20 |
| 329 | DEX0374_81.nt.1 | 8p11.21 | | 586 | DEX0374_81.aa.1 |
| 330 | DEX0374_81.nt.2 | 8p11.21 | — | | |
| 331 | DEX0374_82.nt.1 | * | | 587 | DEX0374_82.aa.1 |
| 332 | DEX0374_82.nt.2 | * | | | |
| 333 | DEX0374_82.nt.3 | * | | 588 | DEX0374_82.aa.3 |
| 334 | DEX0374_82.nt.4 | * | | 589 | DEX0374_82.aa.4 |
| 335 | DEX0374_82.nt.5 | * | | | |
| 336 | DEX0374_82.nt.6 | * | 1536-2034 | 590 | DEX0374_82.aa.6 |
| 337 | DEX0374_82.nt.7 | * | 37-606 | 591 | DEX0374_82.aa.7 |
| 338 | DEX0374_82.nt.8 | * | 37-606 | 591 | DEX0374_82.aa.7 |
| 339 | DEX0374_82.nt.9 | * | 109-370 | 592 | DEX0374_82.aa.9 |
| 340 | DEX0374_82.nt.10 | * | 37-606 | 591 | DEX0374_82.aa.7 |
| 341 | DEX0374_83.nt.1 | 1p34.1 | | | |
| 342 | DEX0374_83.nt.2 | 1p34.1 | | | |
| 343 | DEX0374_83.nt.3 | 1p34.1 | — | | |
| 344 | DEX0374_84.nt.1 | 2q21.3 | | 593 | DEX0374_84.aa.1 |
| 345 | DEX0374_84.nt.2 | 2q21.3 | — | | |
| 346 | DEX0374_85.nt.1 | 8p11.21 | | 594 | DEX0374_85.aa.1 |
| 347 | DEX0374_85.nt.2 | 8p11.21 | — | | |
| 348 | DEX0374_85.nt.3 | 8p11.21 | — | | |
| 349 | DEX0374_85.nt.4 | 8p11.21 | — | | |
| 350 | DEX0374_85.nt.5 | 8p11.21 | 139-424 | 595 | DEX0374_85.aa.5 |
| 351 | DEX0374_85.nt.6 | 8p11.21 | 121-405 | 596 | DEX0374_85.aa.6 |
| 352 | DEX0374_85.nt.7 | 8p11.21 | — | | |
| 353 | DEX0374_85.nt.8 | 8p11.21 | — | | |
| 354 | DEX0374_85.nt.9 | 8p11.21 | — | | |
| 355 | DEX0374_85.nt.10 | 8p11.21 | — | | |
| 356 | DEX0374_85.nt.11 | 8p11.21 | 1-249 | 597 | DEX0374_85.aa.11 |
| 357 | DEX0374_85.nt.12 | 8p11.21 | — | | |
| 358 | DEX0374_85.nt.13 | 8p11.21 | — | | |
| 359 | DEX0374_85.nt.14 | 8p11.21 | — | | |
| 360 | DEX0374_85.nt.15 | 8p11.21 | — | | |
| 361 | DEX0374_85.nt.16 | 8p11.21 | — | | |
| 362 | DEX0374_85.nt.17 | 8p11.21 | — | | |
| 363 | DEX0374_85.nt.18 | 8p11.21 | — | | |
| 364 | DEX0374_85.nt.19 | 8p11.21 | — | | |
| 365 | DEX0374_85.nt.20 | 8p11.21 | 1-436 | 598 | DEX0374_85.aa.20 |
| 366 | DEX0374_85.nt.21 | 8p11.21 | 1-436 | 598 | DEX0374_85.aa.20 |
| 367 | DEX0374_85.nt.22 | 8p11.21 | 1-436 | 598 | DEX0374_85.aa.20 |
| 368 | DEX0374_85.nt.23 | 8p11.21 | 1-436 | 598 | DEX0374_85.aa.20 |
| 369 | DEX0374_85.nt.24 | 8p11.21 | — | | |
| 370 | DEX0374_85.nt.25 | 8p11.21 | — | | |
| 371 | DEX0374_85.nt.26 | 8p11.21 | 1-436 | 598 | DEX0374_85.aa.20 |
| 372 | DEX0374_85.nt.27 | 8p11.21 | — | | |
| 373 | DEX0374_85.nt.28 | 8p11.21 | 1-436 | 598 | DEX0374_85.aa.20 |
| 374 | DEX0374_85.nt.29 | 8p11.21 | 1-436 | 598 | DEX0374_85.aa.20 |
| 375 | DEX0374_85.nt.30 | 8p11.21 | 1-436 | 598 | DEX0374_85.aa.20 |
| 376 | DEX0374_85.nt.31 | 8p11.21 | 1-436 | 598 | DEX0374_85.aa.20 |
| 377 | DEX0374_85.nt.32 | 8p11.21 | 1-436 | 598 | DEX0374_85.aa.20 |
| 378 | DEX0374_85.nt.33 | 8p11.21 | — | | |
| 379 | DEX0374_86.nt.1 | 11p15.5 | | 599 | DEX0374_86.aa.1 |
| 380 | DEX0374_86.nt.2 | 11p15.5 | 88-471 | 600 | DEX0374_86.aa.2 |
| 381 | DEX0374_87.nt.1 | 3q25.1 | | 601 | DEX0374_87.aa.1 |
| 382 | DEX0374_87.nt.2 | 3q25.1 | — | | |
| 383 | DEX0374_88.nt.1 | 1q42.2 | | 602 | DEX0374_88.aa.1 |
| 384 | DEX0374_88.nt.2 | 1q42.2 | | | |
| 385 | DEX0374_88.nt.3 | 1q42.2 | 254-659 | 603 | DEX0374_88.aa.3 |
| 386 | DEX0374_88.nt.4 | 1q42.2 | — | | |
| 387 | DEX0374_89.nt.1 | 1p32.1 | | 604 | DEX0374_89.aa.1 |
| 388 | DEX0374_89.nt.2 | 1p32.1 | — | | |
| 389 | DEX0374_90.nt.1 | 15q25.1 | | 605 | DEX0374_90.aa.1 |
| 390 | DEX0374_90.nt.2 | 15q25.1 | — | | |
| 391 | DEX0374_91.nt.1 | 1p21.3 | | 606 | DEX0374_91.aa.1 |
| 392 | DEX0374_91.nt.2 | 1p21.3 | | | |
| 393 | DEX0374_91.nt.3 | 1p21.3 | — | | |
| 394 | DEX0374_92.nt.1 | 13q33.1 | | | |
| 395 | DEX0374_92.nt.2 | 13q33.1 | — | | |
| 396 | DEX0374_93.nt.1 | 5q14.1 | | 607 | DEX0374_93.aa.1 |
| 397 | DEX0374_93.nt.2 | 5q14.1 | — | | |
| 398 | DEX0374_94.nt.1 | 2q35 | | 608 | DEX0374_94.aa.1 |
| 399 | DEX0374_94.nt.2 | 2q35 | — | | |
| 400 | DEX0374_95.nt.1 | 2q35 | | 609 | DEX0374_95.aa.1 |
| 401 | DEX0374_95.nt.2 | 2q35 | 1-417 | 610 | DEX0374_95.aa.2 |
| 402 | DEX0374_96.nt.1 | 6q22.1 | | | |
| 403 | DEX0374_97.nt.1 | 6q22.1 | | | |
| 404 | DEX0374_98.nt.1 | 12q23.3 | | | |
| 405 | DEX0374_99.nt.1 | 1p32.2 | | | |
| 406 | DEX0374_100.nt.1 | 9q31.3 | | 611 | DEX0374_100.aa.1 |
| 407 | DEX0374_101.nt.1 | 2q11.2 | | | |
| 408 | DEX0374_102.nt.1 | 7q22.1 | | | |
| 409 | DEX0374_103.nt.1 | * | | | |

[0428] For the polypeptides of the invention, the following attributes were found, epitopes, post translational modifications, signal peptides and transmembrane domains. Antigenicity (Epitope) prediction was performed through the antigenic module in the EMBOSS package. Rice, P., EMBOSS: The European Molecular Biology Open Software Suite, Trends in Genetics 16(6): 276-277 (2000). The antigenic module predicts potentially antigenic regions of a protein sequence, using the method of Kolaskar and Tongaonkar. Kolaskar, A S and Tongaonkar, P C., A semi-empirical method for prediction of antigenic determinants on protein antigens, FEBS Letters 276: 172-174 (1990). Examples of post-translational modifications (PTMs) and other motifs of the HSPs of this invention are listed below. In addition, antibodies that specifically bind such post-translational modifications may be useful as a diagnostic or as therapeutic. The PTMs and other motifs were predicted by using the ProSite Dictionary of Proteins Sites and Patterns (Bairoch et al., Nucleic Acids Res. 25(1): 217-221 (1997)), the following motifs, including PTMs, were predicted for the HSPs of the invention. The signal peptides were detected by using the SignalP 2.0, see Nielsen et al., Protein Engineering 12, 3-9 (1999). Prediction of transmembrane helices in proteins was performed by the application TMHMM 2.0, “currently the best performing transmembrane prediction program”, according to authors (Krogh et al., Journal of Molecular Biology, 305(3): 567-580, (2001); Moller et al., Bioinformatics, 17(7):646-653, (2001); Sonnhammer, et al., A hidden Markov model for predicting transmembrane helices in protein sequences in Glasgow, et al. Ed. Proceedings of the Sixth International Conference on Intelligent Systems for Molecular Biology, pages 175-182, Menlo Park, Calif., 1998. AAAI Press. The PSORT II program may also be used to predict cellular localizations. Horton et al., Intelligent Systems for Molecular Biology 5: 147-152 (1997). The table below includes the following sequence annotations: Signal peptide presence; TM (number of membrane domain, topology in orientation and position); Amino acid location and antigenic index (location, AI score, length); PTM and other motifs (type, amino acid residue locations).

| SequenceID | Signal P | TMHMM | Antigenicity | PTM |
|---|---|---|---|---|
| DEX0374_3.aa.2 | N | 0 -o | 268-290, 1.26; | Amidation 152-155; |
| | | | 791-817, 1.253; | AsnGlycosylation 80-83, |
| | | | 237-246, 1.216; | 232-235, 494-497, |
| | | | 489-500, 1.199; | 512-515; |
| | | | 44-73, 1.187; 592-604, | Camp_Phospho_Site |
| | | | 1.181; 212-233, | 507-510; |
| | | | 1.172; 122-146, | Ck2_Phospho_Site 16-19, |
| | | | 1.171; 439-471, | 20-23, 24-27, 29-32 |
| | | | 1.17; 107-114, | 57-60, 96-99, 120-123, |
| | | | 1.165; 740-774, | 247-250, 268-271, |
| | | | 1.16; 719-729, | 299-302, 318-321, 345-348, |
| | | | 1.16; 344-358, | 355-358, 476-479, |
| | | | 1.159; 255-265, | 518-521, 556-559, 724-727; |
| | | | 1.137; 580-586, | Myristyl 66-71, |
| | | | 1.135; 527-551, | 117-122, 177-182, 445-450, |
| | | | 1.132; 832-840, | 669-674, 717-722; |
| | | | 1.132; 392-408, | Pkc_Phospho_Site 82-84, |
| | | | 1.127; 697-712, | 145-147, 181-183, |
| | | | 1.12; 654-661, | 217-219, 242-244, 247-249, |
| | | | 1.12; 626-651, | 296-298, 299-301, |
| | | | 1.117; 553-561, | 328-330, 355-357, 390-392, |
| | | | 1.117; 79-90, | 538-540, 556-558, |
| | | | 1.113; 297-317, | 569-571, 584-586, 844-846; |
| | | | 1.107; 192-198, | Rgd 413-415, |
| | | | 1.104; 819-825, | 456-458; |
| | | | 1.1; 781-788, | Tyr_Phospho_Site 517-525, |
| | | | 1.094; 614-623, | 655-663; |
| | | | 1.093; 511-520, | |
| | | | 1.092; 148-155, | |
| | | | 1.082; 412-421, | |
| | | | 1.08; 428-436, | |
| | | | 1.079; 333-339, | |
| | | | 1.074; 319-325, | |
| | | | 1.071; 677-686, | |
| | | | 1.066; 99-105, | |
| | | | 1.066; 179-185, | |
| | | | 1.057 | |
| DEX0374_3.aa.6 | N | 0 -o | 329-355, 1.253; | Asn_Glycosylation 32-35, |
| | | | 27-38, 1.199; 130-142, | 50-53; |
| | | | 1.181; 278-312, | Camp_Phospho_Site 45-48; |
| | | | 1.16; 257-267, | Ck2_Phospho_Site |
| | | | 1.16; 118-124, | 14-17, 56-59, 94-97, |
| | | | 1.135; 65-89, | 262-265; Myristyl |
| | | | 1.132; 370-378, | 207-212, 255-260; |
| | | | 1.132; 235-250, | Pkc_Phospho_Site 76-78, |
| | | | 1.12; 192-199, | 94-96, 107-109, |
| | | | 1.12; 164-189, | 122-124, 382-384; |
| | | | 1.117; 91-99, | Tyr_Phospho_Site 55-63, |
| | | | 1.117; 357-363, | 193-201; |
| | | | 1.1; 319-326, | |
| | | | 1.094; 152-161, | |
| | | | 1.093; 49-58, | |
| | | | 1.092; 215-224, | |
| | | | 1.066 | |
| DEX0374_3.aa.9 | N | 0 -o | 268-290, 1.26; | Amidation 152-155; |
| | | | 237-246, 1.216; | Asn_Glycosylation 80-83, |
| | | | 489-500, 1.199; | 232-235, 494-497, |
| | | | 44-73, 1.187; 592-604, | 512-515; |
| | | | 1.181; 212-233, | Camp_Phospho_Site |
| | | | 1.172; 791-799, | 507-510; |
| | | | 1.172; 122-146, | Ck2_Phospho_Site 16-19, |
| | | | 1.171; 439-471, | 20-23, 24-27, 29-32, |
| | | | 1.17; 107-114, | 57-60, 96-99, 120-123, |
| | | | 1.165; 740-774, | 247-250, 268-271, |
| | | | 1.16; 719-729, | 299-302, 318-321, 345-348, |
| | | | 1.16; 344-358, | 355-358, 476-479, |
| | | | 1.159; 255-265, | 518-521, 556-559, 724-727; |
| | | | 1.137; 580-586, | Myristyl 66-71, |
| | | | 1.135; 527-551, | 117-122, 177-182, 445-450, |
| | | | 1.132; 392-408, | 669-674, 717-722; |
| | | | 1.127; 697-712, | Pkc_Phospho_Site 82-84, |
| | | | 1.12; 654-661, | 145-147, 181-183, |
| | | | 1.12; 626-651, | 217-219, 242-244, 247-249, |
| | | | 1.117; 553-561, | 296-298, 299-301, |
| | | | 1.117; 79-90, | 328-330, 355-357, 390-392, |
| | | | 1.113; 297-317, | 538-540, 556-558, |
| | | | 1.107; 192-198, | 569-571, 584-586; Rgd |
| | | | 1.104; 781-788, | 413-415, 456-458; |
| | | | 1.094; 614-623, | Tyr_Phospho_Site 517-525, |
| | | | 1.093; 511-520, | 655-663; |
| | | | 1.092; 148-155, | |
| | | | 1.082; 412-421, | |
| | | | 1.08; 428-436, | |
| | | | 1.079; 333-339, | |
| | | | 1.074; 319-325, | |
| | | | 1.071; 677-686, | |
| | | | 1.066; 99-105, | |
| | | | 1.066; 179-185, | |
| | | | 1.057 | |
| DEX0374_3.aa.12 | N | 0 -o | 268-290, 1.26; | Amidation 152-155; |
| | | | 791-817, 1.253; | Asn_Glycosylation 80-83, |
| | | | 237-246, 1.216; | 232-235, 494-497, |
| | | | 489-500, 1.199; | 512-515; |
| | | | 44-73, 1.187; 592-604, | Camp_Phospho_Site |
| | | | 1.181; 212-233, | 507-510; |
| | | | 1.172; 122-146, | Ck2_Phospho_Site 16-19, |
| | | | 1.171; 439-471, | 20-23, 24-27, 29-32, |
| | | | 1.17; 107-114, | 57-60, 96-99, 120-123, |
| | | | 1.165; 740-774, | 247-250, 268-271, |
| | | | 1.16; 719-729, | 299-302, 318-321, 345-348, |
| | | | 1.16; 344-358, | 355-358, 476-479, |
| | | | 1.159; 255-265, | 518-521, 556-559, 724-727, |
| | | | 1.137; 580-586, | Myristyl 66-71, |
| | | | 1.135; 527-551, | 117-122, 177-182, 445-450, |
| | | | 1.132; 392-408, | 669-674, 717-722; |
| | | | 1.127; 697-712, | Pkc_Phospho_Site 82-84, |
| | | | 1.12; 654-661, | 145-147, 181-183, |
| | | | 1.12; 626-651, | 217-219, 242-244, 247-249, |
| | | | 1.117; 553-561, | 296-298, 299-301, |
| | | | 1.117; 79-90, | 328-330, 355-357, 390-392, |
| | | | 1.113; 297-317, | 538-540, 556-558, |
| | | | 1.107; 192-198, | 569-571, 584-586; Rgd |
| | | | 1.104; 819-836, | 413-415, 456-458; |
| | | | 1.1; 781-788, | Tyr_Phospho_Site 517-525, |
| | | | 1.094; 614-623, | 655-663; |
| | | | 1.093; 511-520, | |
| | | | 1.092; 148-155, | |
| | | | 1.082; 412-421, | |
| | | | 1.08; 428-436, | |
| | | | 1.079; 333-339, | |
| | | | 1.074; 319-325, | |
| | | | 1.071; 677-686, | |
| | | | 1.066; 99-105, | |
| | | | 1.066; 179-185, | |
| | | | 1.057 | |
| DEX0374_3.aa.13 | N | 0 -o | 268-290, 1.26; | Amidation 152-155; |
| | | | 237-246, 1.216; | Asn_Glycosylation 80-83, |
| | | | 489-500, 1.199; | 232-235, 494-497, |
| | | | 44-73, 1.187; 592-604, | 512-515; |
| | | | 1.181; 212-233, | Camp_Phospho_Site |
| | | | 1.172; 122-146, | 507-510; |
| | | | 1.171; 439-471, | Ck2_Phospho_Site 16-19, |
| | | | 1.17; 107-114, | 20-23, 24-27, 29-32, |
| | | | 1.165; 719-729, | 57-60, 96-99, 120-123, |
| | | | 1.16; 344-358, | 247-250, 268-271, |
| | | | 1.159; 740-773, | 299-302, 318-321, 345-348, |
| | | | 1.142; 255-265, | 355-358, 476-479, |
| | | | 1.137; 580-586, | 518-521, 556-559, 724-727, |
| | | | 1.135; 527-551, | 768-771; Myristyl |
| | | | 1.132; 392-408, | 66-71, 117-122, 177-182, |
| | | | 1.127; 697-712, | 445-450, 669-674, |
| | | | 1.12; 654-661, | 717-722; |
| | | | 1.12; 626-651, | Pkc_Phospho_Site 82-84, |
| | | | 1.117; 553-561, | 145-147, 181-183, |
| | | | 1.117; 79-90, | 217-219, 242-244, 247-249, |
| | | | 1.113; 297-317, | 296-298, 299-301, |
| | | | 1.107; 192-198, | 328-330, 355-357, 390-392, |
| | | | 1.104; 614-623, | 538-540, 556-558, |
| | | | 1.093; 511-520, | 569-571, 584-586; Rgd |
| | | | 1.092; 148-155, | 413-415, 456-458; |
| | | | 1.082; 412-421, | Tyr_Phospho_Site 517-525, |
| | | | 1.08; 428-436, | 655-663; |
| | | | 1.079; 333-339, | |
| | | | 1.074; 319-325, | |
| | | | 1.071; 677-686, | |
| | | | 1.066; 99-105, | |
| | | | 1.066; 179-185, | |
| | | | 1.057 | |
| DEX0374_3.aa.14 | N | 0 -o | 268-290, 1.26; | Amidation 152-155; |
| | | | 237-246, 1.216; | Asn_Glycosylation 80-83, |
| | | | 44-73, 1.187; 212-233, | 232-235; |
| | | | 1.172; 122-146, | Camp_Phospho_Site |
| | | | 1.171; 107-114, | 415-418; |
| | | | 1.165; 344-358, | Ck2_Phospho_Site 16-19, |
| | | | 1.159; 255-265, | 20-23, 24-27, 29-32, |
| | | | 1.137; 79-90, | 57-60, 96-99, 120-123, |
| | | | 1.113; 392-408, | 247-250, 268-271, |
| | | | 1.108; 297-317, | 299-302, 318-321, 345-348, |
| | | | 1.107; 192-198, | 355-358; Myristyl |
| | | | 1.104; 148-155, | 66-71, 117-122, 177-182; |
| | | | 1.082; 333-339, | Pkc_Phospho_Site |
| | | | 1.074; 319-325, | 82-84, 145-147, 181-183, |
| | | | 1.071; 99-105, | 217-219, 242-244, |
| | | | 1.066; 179-185, | 247-249, 296-298, 299-301, |
| | | | 1.057 | 328-330, 355-357, |
| | | | | 390-392; |
| DEX0374_3.aa.15 | N | 0 -o | 268-290, 1.26; | Amidation 152-155; |
| | | | 237-246, 1.216; | Asn_Glycosylation 80-83, |
| | | | 44-73, 1.187; 212-233, | 232-235; |
| | | | 1.172; 122-146, | Ck2_Phospho_Site 16-19, |
| | | | 1.171; 107-114, | 20-23, 24-27, 29-32, |
| | | | 1.165; 255-265, | 57-60, 96-99, 120-123, |
| | | | 1.137; 79-90, | 247-250, 268-271, |
| | | | 1.113; 297-336, | 299-302, 318-321, 324-327; |
| | | | 1.107; 192-198, | Myristyl 66-71, |
| | | | 1.104; 148-155, | 117-122, 177-182; |
| | | | 1.082; 99-105, | Pkc_Phospho_Site 82-84, |
| | | | 1.066; 179-185, | 145-147, 181-183, |
| | | | 1.057 | 217-219, 242-244, 247-249, |
| | | | | 296-298, 299-301, |
| | | | | 333-335; |
| DEX0374_3.aa.16 | N | 0 -o | 44-73, 1.187; 122-146, | Amidation 152-155; |
| | | | 1.171; 107-114, | Asn_Glycosylation 80-83; |
| | | | 1.165; 79-90, | Camp_Phospho_Site |
| | | | 1.113; 99-105, | 154-157; |
| | | | 1.066 | Ck2_Phospho_Site 16-19, |
| | | | | 20-23, 24-27, 29-32, |
| | | | | 57-60, 96-99, 120-123; |
| | | | | Myristyl 66-71, |
| | | | | 117-122; |
| | | | | Pkc_Phospho_Site 82-84, |
| | | | | 145-147; |
| DEX0374_3.aa.19 | N | 0 -o | 193-215, 1.26; | Amidation 77-80; |
| | | | 716-742, 1.253; | Asn_Glycosylation 30-33, |
| | | | 162-171, 1.216; | 157-160, 419-422, |
| | | | 414-425, 1.199; | 437-440; |
| | | | 29-39, 1.197; 4-23, | Camp_Phospho_Site |
| | | | 1.187; 517-529, | 432-435; |
| | | | 1.181; 137-158, | Ck2_Phospho_Site 3-6, |
| | | | 1.172; 47-71, | 45-48, 172-175, 193-196, |
| | | | 1.171; 364-396, | 224-227, 243-246, |
| | | | 1.17; 665-699, | 270-273, 280-283, 401-404, |
| | | | 1.16; 644-654, | 443-446, 481-484, |
| | | | 1.16; 269-283, | 649-652; Myristyl 16-21, |
| | | | 1.159; 180-190, | 42-47, 102-107, |
| | | | 1.137; 505-511, | 370-375, 594-599, 642-647; |
| | | | 1.135; 452-476, | Pkc_Phospho_Site |
| | | | 1.132; 757-765, | 32-34, 70-72, 106-108, |
| | | | 1.132; 317-333, | 142-144, 167-169, 172-174, |
| | | | 1.127; 622-637, | 221-223, 224-226, |
| | | | 1.12; 579-586, | 253-255, 280-282, 315-317, |
| | | | 1.12; 551-576, | 463-465, 481-483, |
| | | | 1.117; 478-486, | 494-496, 509-511, 769-771; |
| | | | 1.117; 222-242, | Rgd 338-340, |
| | | | 1.107; 117-123, | 381-383; |
| | | | 1.104; 744-750, | Tyr_Phospho_Site 442-450, |
| | | | 1.1; 706-713, | 580-588; |
| | | | 1.094; 539-548, | |
| | | | 1.093; 436-445, | |
| | | | 1.092; 73-80, | |
| | | | 1.082; 337-346, | |
| | | | 1.08; 353-361, | |
| | | | 1.079; 258-264, | |
| | | | 1.074; 244-250, | |
| | | | 1.071; 602-611, | |
| | | | 1.066; 104-110, | |
| | | | 1.057 | |
| DEX0374_3.aa.22 | N | 0 -o | 268-290, 1.26; | Amidation 152-155; |
| | | | 791-817, 1.253; | Asn_Glycosylation 80-83, |
| | | | 237-246, 1.216; | 232-235, 494-497, |
| | | | 852-865, 1.216; | 512-515; |
| | | | 489-500, 1.199; | Camp_Phospho_Site |
| | | | 44-73, 1.187; 592-604, | 507-510; |
| | | | 1.181; 212-233, | Ck2_Phospho_Site 16-19, |
| | | | 1.172; 122-146, | 20-23, 24-27, 29-32, |
| | | | 1.171; 831-848, | 57-60, 96-99, 120-123, |
| | | | 1.17; 439-471, | 247-250, 268-271, |
| | | | 1.17; 107-114, | 299-302, 318-321, 345-348, |
| | | | 1.165; 740-774, | 355-358, 476-479, |
| | | | 1.16; 719-729, | 518-521, 556-559, 724-727; |
| | | | 1.16; 344-358, | Myristyl 66-71, |
| | | | 1.159; 255-265, | 117-122, 177-182, 445-450, |
| | | | 1.137; 580-586, | 669-674, 717-722; |
| | | | 1.135; 527-551, | Pkc_Phospho_Site 82-84, |
| | | | 1.132; 392-408, | 145-147, 181-183, |
| | | | 1.127; 697-712, | 217-219, 242-244, 247-249, |
| | | | 1.12; 654-661, | 296-298, 299-301, |
| | | | 1.12; 626-651, | 328-330, 355-357, 390-392, |
| | | | 1.117; 553-561, | 538-540, 556-558, |
| | | | 1.117; 79-90, | 569-571, 584-586, 836-838, |
| | | | 1.113; 297-317, | 869-871; Rgd |
| | | | 1.107; 192-198, | 413-415, 456-458; |
| | | | 1.104; 819-827, | Tyr_Phospho_Site 517-525, |
| | | | 1.1; 781-788, | 655-663; |
| | | | 1.094; 614-623, | |
| | | | 1.093; 511-520, | |
| | | | 1.092; 148-155, | |
| | | | 1.082; 412-421, | |
| | | | 1.08; 428-436, | |
| | | | 1.079; 333-339, | |
| | | | 1.074; 319-325, | |
| | | | 1.071; 677-686, | |
| | | | 1.066; 99-105, | |
| | | | 1.066; 179-185, | |
| | | | 1.057 | |
| DEX0374_3.aa.23 | N | 0 -o | 268-290, 1.26; | Amidation 152-155; |
| | | | 237-246, 1.216; | Asn_Glycosylation 80-83, |
| | | | 489-500, 1.199; | 232-235, 494-497, |
| | | | 44-73, 1.187; 592-604, | 512-515, 812-815; |
| | | | 1.181; 212-233, | Camp_Phospho_Site |
| | | | 1.172; 791-802, | 507-510; |
| | | | 1.172; 122-146, | Ck2_Phospho_Site 16-19, |
| | | | 1.171; 439-471, | 20-23, 24-27, 29-32, |
| | | | 1.17; 107-114, | 57-60, 96-99, 120-123, |
| | | | 1.165; 740-774, | 247-250, 268-271, |
| | | | 1.16; 719-729, | 299-302, 318-321, 345-348, |
| | | | 1.16; 344-358, | 355-358, 476-479, |
| | | | 1.159; 255-265, | 518-521, 556-559, 724-727; |
| | | | 1.137; 580-586, | Myristyl 66-71, |
| | | | 1.135; 527-551, | 117-122, 177-182, 445-450, |
| | | | 1.132; 392-408, | 669-674, 717-722, |
| | | | 1.127; 811-823, | 813-818; |
| | | | 1.125; 697-712, | Pkc_Phospho_Site 82-84, |
| | | | 1.12; 654-661, | 145-147, 181-183, |
| | | | 1.12; 626-651, | 217-219, 242-244, 247-249, |
| | | | 1.117; 553-561, | 296-298, 299-301, |
| | | | 1.117; 79-90, | 328-330, 355-357, 390-392, |
| | | | 1.113; 297-317, | 538-540, 556-558, |
| | | | 1.107; 192-198, | 569-571, 584-586, 814-816; |
| | | | 1.104; 781-788, | Rgd 413-415, |
| | | | 1.094; 614-623, | 456-458; |
| | | | 1.093; 511-520, | Tyr_Phospho_Site 517-525, |
| | | | 1.092; 148-155, | 655-663; |
| | | | 1.082; 412-421, | |
| | | | 1.08; 428-436, | |
| | | | 1.079; 333-339, | |
| | | | 1.074; 319-325, | |
| | | | 1.071; 677-686, | |
| | | | 1.066; 99-105, | |
| | | | 1.066; 179-185, | |
| | | | 1.057 | |
| DEX0374_3.aa.24 | N | 0 -o | 268-290, 1.26; | Amidation 152-155; |
| | | | 237-246, 1.216; | Asn_Glycosylation 80-83, |
| | | | 489-500, 1.199; | 232-235, 494-497, |
| | | | 44-73, 1.187; 212-233, | 512-515; |
| | | | 1.172; 122-146, | Camp_Phospho_Site |
| | | | 1.171; 439-471, | 507-510; |
| | | | 1.17; 107-114, | Ck2_Phospho_Site 16-19, |
| | | | 1.165; 344-358, | 20-23, 24-27, 29-32, |
| | | | 1.159; 255-265, | 57-60, 96-99, 120-123, |
| | | | 1.137; 392-408, | 247-250, 268-271, |
| | | | 1.127; 79-90, | 299-302, 318-321, 345-348, |
| | | | 1.113; 297-317, | 355-358, 476-479, |
| | | | 1.107; 192-198, | 518-521; Myristyl 66-71, |
| | | | 1.104; 148-155, | 117-122, 177-182, |
| | | | 1.082; 412-421, | 445-450; |
| | | | 1.08; 428-436, | Pkc_Phospho_Site 82-84, |
| | | | 1.079; 333-339, | 145-147, 181-183, |
| | | | 1.074; 319-325, | 217-219, 242-244, 247-249, |
| | | | 1.071; 99-105, | 296-298, 299-301, |
| | | | 1.066; 179-185, | 328-330, 355-357, 390-392; |
| | | | 1.057 | Rgd 413-415, |
| | | | | 456-458; |
| DEX0374_3.aa.25 | N | 0 -o | 237-246, 1.216; | Amidation 152-155; |
| | | | 44-73, 1.187; 212-233, | Asn_Glycosylation 80-83, |
| | | | 1.172; 122-146, | 232-235; |
| | | | 1.171; 107-114, | Ck2_Phospho_Site 16-19, |
| | | | 1.165; 255-266, | 20-23, 24-27, 29-32, |
| | | | 1.165; 79-90, | 57-60, 96-99, 120-123, |
| | | | 1.113; 192-198, | 247-250; Myristyl |
| | | | 1.104; 148-155, | 66-71, 117-122, 177-182; |
| | | | 1.082; 99-105, | Pkc_Phospho_Site |
| | | | 1.066; 179-185, | 82-84, 145-147, 181-183, |
| | | | 1.057 | 217-219, 242-244, |
| | | | | 247-249; |
| DEX0374_6.aa.3 | N | 0 -o | 4-14, 1.177; 18-53, | |
| | | | 1.164 | |
| DEX0374_6.aa.5 | y | 0 -o | 157-173, 1.165; | Amidation 244-247; |
| | | | 20-47, 1.136; 50-61, | Asn_Glycosylation |
| | | | 1.125; 5-14, | 221-224, 236-239; |
| | | | 1.125; 108-115, | Camp_Phospho_Site |
| | | | 1.106; 74-83, | 125-128, 130-133; |
| | | | 1.097; 175-182, | Ck2_Phospho_Site 99-102, |
| | | | 1.093; 64-72, | 110-113, 133-136, |
| | | | 1.08; 221-228, | 164-167, 210-213, 296-299, |
| | | | 1.079; 197-205, | 313-316, 318-321; |
| | | | 1.074; 141-147, | Myristyl 26-31, 46-51, |
| | | | 1.043 | 51-56, 143-148, |
| | | | | 148-153; |
| | | | | Pkc_Phospho_Site 89-91, |
| | | | | 110-112, 128-130, |
| | | | | 133-135, 217-219, 318-320; |
| | | | | Tyr_Phospho_Site |
| | | | | 219-225; |
| DEX0374_6.aa.10 | y | 0 -o | 157-173, 1.165; | Amidation 244-247; |
| | | | 20-47, 1.136; 50-61, | Asn_Glycosylation |
| | | | 1.125; 5-14, | 221-224, 236-239; |
| | | | 1.125; 315-326, | Camp_Phospho_Site |
| | | | 1.112; 367-375, | 125-128, 130-133; |
| | | | 1.109; 337-348, | Ck2_Phospho_Site 99-102, |
| | | | 1.107; 108-115, | 110-113, 133-136, |
| | | | 1.106; 74-83, | 164-167, 210-213, 296-299, |
| | | | 1.097; 350-359, | 313-316, 319-322, |
| | | | 1.093; 175-182, | 331-334, 363-366, 388-391; |
| | | | 1.093; 379-391, | Myristyl 26-31, |
| | | | 1.09; 64-72, | 46-51, 51-56, 143-148, |
| | | | 1.08; 221-228, | 148-153, 364-369, 394-399; |
| | | | 1.079; 197-205, | Pkc_Phospho_Site |
| | | | 1.074; 141-147, | 89-91, 110-112, 128-130, |
| | | | 1.043 | 133-135, 217-219; |
| | | | | Tyr_Phospho_Site 219-225; |
| DEX0374_6.aa.11 | y | 0 -o | 157-173, 1.165; | Amidation 244-247; |
| | | | 309-323, 1.158; | Asn_Glycosylation |
| | | | 20-47, 1.136; 50-61, | 221-224, 236-239; |
| | | | 1.125; 5-14, | Camp_Phospho_Site |
| | | | 1.125; 108-115, | 125-128, 130-133; |
| | | | 1.106; 74-83 | Ck2_Phospho_Site 99-102, |
| | | | 1.097; 175-182, | 110-113, 133-136, |
| | | | 1.093; 64-72, | 164-167, 210-213, 296-299, |
| | | | 1.08; 221-228, | 313-316; Myristyl |
| | | | 1.079; 197-205, | 26-31, 46-51, 51-56, |
| | | | 1.074; 141-147, | 143-148, 148-153; |
| | | | 1.043 | Pkc_Phospho_Site 89-91, |
| | | | | 110-112, 128-130, |
| | | | | 133-135, 217-219; |
| | | | | Tyr_Phospho_Site 219-225; |
| DEX0374_6.aa.12 | y | 0 -o | 157-173, 1.165; | Camp_Phospho_Site |
| | | | 20-47, 1.136; 50-61, | 125-128, 130-133; |
| | | | 1.125; 5-14, | Ck2_Phospho_Site 99-102, |
| | | | 1.125; 108-115, | 110-113, 133-136, |
| | | | 1.106; 74-83, | 164-167; Myristyl 26-31, |
| | | | 1.097; 175-182, | 46-51, 51-56, 143-148, |
| | | | 1.093; 64-72, | 148-153; |
| | | | 1.08; 141-147, | Pkc_Phospho_Site 89-91, |
| | | | 1.043 | 110-112, 128-130, |
| | | | | 133-135; |
| DEX0374_6.aa.15 | N | 0 -i | 79-101, 1.237; | Asn_Glycosylation 15-18, |
| | | | 152-173, 1.212; | 118-121, 128-131; |
| | | | 41-61, 1.159; 11-36, | Ck2_Phospho_Site 78-81, |
| | | | 1.132; 117-125, | 139-142, 151-154, |
| | | | 1.085; 127-133, | 159-162; Myristyl 23-28, |
| | | | 1.043 | 108-113, 119-124; |
| | | | | Pkc_Phospho_Site 14-16, |
| | | | | 130-132, 136-138, |
| | | | | 143-145, 174-176; |
| DEX0374_6.aa.16 | y | 0 -o | 157-173, 1.165; | Amidation 253-256; |
| | | | 20-47, 1.136; 50-61, | Asn_Glycosylation |
| | | | 1.125; 5-14, | 230-233, 245-248; |
| | | | 1.125; 324-335, | Camp_Phospho_Site |
| | | | 1.112; 376-384, | 125-128, 130-133, 429-432, |
| | | | 1.109; 346-357, | Ck2_Phospho_Site |
| | | | 1.107; 407-426, | 99-102, 110-113, 133-136, |
| | | | 1.107; 108-115, | 164-167, 219-222, |
| | | | 1.106; 74-83, | 305-308, 322-325, 328-331, |
| | | | 1.097; 359-368, | 340-343, 372-375, |
| | | | 1.093; 175-182, | 397-400, 420-423; |
| | | | 1.093; 388-400, | Myristyl 26-31, 46-51, |
| | | | 1.09; 64-72, | 51-56, 143-148, |
| | | | 1.08; 230-237, | 148-153, 373-378, 403-408; |
| | | | 1.079; 428-437, | Pkc_Phospho_Site |
| | | | 1.072; 141-147, | 89-91, 110-112, 128-130, |
| | | | 1.043 | 133-135, 210-212, |
| | | | | 226-228, 432-434; |
| | | | | Tyr_Phospho_Site 228-234; |
| DEX0374_6.aa.17 | y | 0 -o | 157-173, 1.165; | Amidation 244-247; |
| | | | 20-47, 1.136; 50-61, | Asn_Glycosylation |
| | | | 1.125; 5-14, | 221-224, 236-239; |
| | | | 1.125; 329-342, | Camp_Phospho_Site |
| | | | 1.123; 315-326, | 125-128, 130-133; |
| | | | 1.112; 108-115, | Ck2_Phospho_Site 99-102, |
| | | | 1.106; 74-83, | 110-113, 133-136, |
| | | | 1.097; 175-182, | 164-167, 210-213, 296-299, |
| | | | 1.093; 64-72, | 313-316, 319-322, |
| | | | 1.08; 221-228, | 331-334, 363-366; |
| | | | 1.079; 197-205, | Myristyl 26-31, 46-51, |
| | | | 1.074; 141-147, | 51-56, 143-148, |
| | | | 1.043 | 148-153, 380-385; |
| | | | | Pkc_Phospho_Site 89-91, |
| | | | | 110-112, 128-130, |
| | | | | 133-135, 217-219, 363-365, |
| | | | | 384-386; |
| | | | | Tyr_Phospho_Site 219-225; |
| DEX0374_16.aa.4 | N | 0 -o | 433-456, 1.234; | Amidation 461-464, |
| | | | 375-384, 1.204; | 823-826; |
| | | | 267-278, 1.183; | Asn_Glycosylation |
| | | | 57-76, 1.183; 280-290, | 225-228, 323-326, 341-344, |
| | | | 1.169; 126-134, | 351-354, 357-360, |
| | | | 1.168; 494-504, | 366-369, 390-393, 465-468, |
| | | | 1.167; 410-424, | 754-757, 940-943; |
| | | | 1.166; 915-930, | Camp_Phospho_Site |
| | | | 1.16; 149-168, | 760-763; |
| | | | 1.155; 613-652, | Ck2_Phospho_Site 42-45, |
| | | | 1.151; 464-481, | 201-204, 205-208, |
| | | | 1.15; 88-107, | 217-220, 228-231, 230-233, |
| | | | 1.149; 110-121, | 241-244, 248-251, |
| | | | 1.142; 887-896, | 314-317, 325-328, 330-333, |
| | | | 1.127; 304-319, | 509-512, 617-620, |
| | | | 1.127; 41-48, | 658-661, 676-679, 681-684, |
| | | | 1.127; 231-239, | 700-703, 812-815, |
| | | | 1.123; 4-13, | 840-843, 853-856, 887-890, |
| | | | 1.122; 189-197, | 934-937, 942-945; |
| | | | 1.121; 520-541, | Glycosaminoglycan |
| | | | 1.114; 938-952, | 846-849; Myristyl |
| | | | 1.112; 851-863, | 342-347, 358-363, 362-367, |
| | | | 1.111; 244-254, | 595-600, 598-603, |
| | | | 1.11; 388-395, | 732-737, 733-738, 753-758, |
| | | | 1.103; 697-708, | 762-767, 833-838, |
| | | | 1.1; 483-490, | 837-842, 888-893; |
| | | | 1.097; 555-566, | Pkc_Phospho_Site 213-215, |
| | | | 1.097; 598-606, | 230-232, 258-260, |
| | | | 1.092; 834-840, | 259-261, 599-601, 630-632, |
| | | | 1.09; 259-265, | 640-642, 669-671, |
| | | | 1.078; 870-881, | 721-723, 759-761, 950-952; |
| | | | 1.076; 141-147, | Tyr_Phospho_Site |
| | | | 1.068; 810-816, | 57-65; |
| | | | 1.064; 658-664, | |
| | | | 1.061; 799-806, | |
| | | | 1.058; 760-773, | |
| | | | 1.054; 26-39, | |
| | | | 1.047 | |
| DEX0374_16.aa.6 | N | 0 -o | 1237-1264, 1.277; | Amidation 461-464, |
| | | | 1139-1177, 1.255; | 776-779; |
| | | | 433-456, 1.234; | Asn_Glycosylation |
| | | | 1274-1298, 1.224; | 225-228, 323-326, 341-344, |
| | | | 1777-1787, 1.221; | 351-354, 357-360, |
| | | | 1063-1131, 1.204; | 366-369, 390-393, 465-468, |
| | | | 375-384, 1.204; | 707-710, 967-970; |
| | | | 1408-1424, 1.197; | Camp_Phospho_Site |
| | | | 1606-1623, 1.194; | 713-716; |
| | | | 1718-1736, 1.193; | Ck2_Phospho_Site 42-45, |
| | | | 1181-1227, 1.189; | 201-204, 205-208, |
| | | | 1660-1668, 1.185; | 217-220, 228-231, 230-233, |
| | | | 267-278, 1.183; | 241-244, 248-251, |
| | | | 57-76, 1.183; 965-983, | 314-317, 325-328, 330-333, |
| | | | 1.175; 280-290, | 509-512, 629-632, |
| | | | 1.169; 1532-1551, | 634-637, 653-656, 765-768, |
| | | | 1.169; 126-134, | 793-796, 806-809, |
| | | | 1.168; 934-950, | 840-843, 887-890, 933-936; |
| | | | 1.168; 494-504, | Glycosaminoglycan |
| | | | 1.167; 410-424, | 799-802; |
| | | | 1.166; 1553-1566, | Leucine_Zipper 947-968; |
| | | | 1.165; 1020-1037, | Myristyl 342-347, |
| | | | 1.164; 888-899, | 358-363, 362-367, |
| | | | 1.164; 868-883, | 595-600, 598-603, 685-690, |
| | | | 1.16; 1350-1371, | 686-691, 706-711, |
| | | | 1.156; 149-168, | 715-720, 786-791, 790-795, |
| | | | 1.155; 994-1005, | 841-846, 906-911, |
| | | | 1.153; 464-481, | 907-912; |
| | | | 1.15; 88-107, | Pkc_Phospho_Site 213-215, |
| | | | 1.149; 110-121, | 230-232, 258-260, |
| | | | 1.142; 1814-1826, | 259-261, 599-601, 622-624, |
| | | | 1.141; 1850-1862, | 674-676, 712-714, |
| | | | 1.131; 1833-1843, | 994-996; |
| | | | 1.13; 840-849, | Tyr_Phospho_Site 57-65; |
| | | | 1.127; 304-319, | |
| | | | 1.127; 41-48, | |
| | | | 1.127; 231-239, | |
| | | | 1.123; 1460-1473, | |
| | | | 1.123; 4-13, | |
| | | | 1.122; 1337-1344, | |
| | | | 1.122; 189-197, | |
| | | | 1.121; 1868-1884, | |
| | | | 1.12; 1300-1313, | |
| | | | 1.12; 1380-1387, | |
| | | | 1.119; 1039-1056, | |
| | | | 1.118; 1495-1502, | |
| | | | 1.118; 1799-1812, | |
| | | | 1.117; 520-541, | |
| | | | 1.114; 1754-1763, | |
| | | | 1.111; 804-816, | |
| | | | 1.111; 908-914, | |
| | | | 1.111; 244-254, | |
| | | | 1.11; 1445-1453, | |
| | | | 1.104; 388-395, | |
| | | | 1.103; 1573-1579, | |
| | | | 1.101; 650-661, | |
| | | | 1.1; 483-490, | |
| | | | 1.097; 555-566, | |
| | | | 1.097; 920-926, | |
| | | | 1.093; 598-606, | |
| | | | 1.092; 787-793, | |
| | | | 1.09; 1505-1513, | |
| | | | 1.081; 1478-1486, | |
| | | | 1.078; 259-265, | |
| | | | 1.078; 823-834, | |
| | | | 1.076; 1686-1694, | |
| | | | 1.069; 141-147, | |
| | | | 1.068; 763-769, | |
| | | | 1.064; 611-617, | |
| | | | 1.061; 1323-1330, | |
| | | | 1.059; 752-759, | |
| | | | 1.058; 1315-1321, | |
| | | | 1.055; 713-726, | |
| | | | 1.054; 26-39, | |
| | | | 1.047 | |
| DEX0374_16.aa.7 | N | 0 -o | 805-832, 1.277; | Amidation 29-32, 344-347; |
| | | | 707-745, 1.255; 4-24, | Asn_Glycosylation |
| | | | 1.234; 842-866, | 33-36, 275-278, 535-538, |
| | | | 1.224; 1345-1355, | 753-756, 987-990, |
| | | | 1.221; 631-699, | 988-991; |
| | | | 1.204; 976-992, | Camp_Phospho_Site |
| | | | 1.197; 1174-1191, | 281-284; |
| | | | 1.194; 1286-1304, | Ck2_Phospho_Site 77-80, |
| | | | 1.193; 749-795, | 197-200, 202-205, |
| | | | 1.189; 1228-1236, | 221-224, 333-336, 361-364, |
| | | | 1.185; 533-551, | 374-377, 408-411, |
| | | | 1.175; 1100-1119, | 455-458, 501-504, 704-707, |
| | | | 1.169; 502-518, | 803-806, 838-841, |
| | | | 1.168; 62-72, | 876-879, 893-896; |
| | | | 1.167; 1121-1134, | Glycosaminoglycan |
| | | | 1.165; 588-605, | 367-370; |
| | | | 1.164; 456-467, | Leucine_Zipper 515-536; |
| | | | 1.164; 436-451, | Myristyl 163-168, |
| | | | 1.16; 918-939, | 166-171, 253-258, |
| | | | 1.156; 562-573, | 254-259, 274-279, 283-288, |
| | | | 1.153; 32-49, | 354-359, 358-363, |
| | | | 1.15; 1382-1394, | 409-414, 474-479, 475-480, |
| | | | 1.141; 1418-1430, | 627-632, 663-668, |
| | | | 1.131; 1401-1411, | 722-727, 859-864; |
| | | | 1.13; 408-417, | Pkc_Phospho_Site 167-169, |
| | | | 1.127; 1028-1041, | 190-192, 242-244, |
| | | | 1.123; 905-912, | 280-282, 562-564, 579-581, |
| | | | 1.122; 1436-1452, | 704-706, 748-750, |
| | | | 1.12; 868-881, | 752-754, 842-844, 845-847, |
| | | | 1.12; 948-955, | 893-895, 905-907, |
| | | | 1.119; 607-624, | 908-910; |
| | | | 1.118; 1063-1070, | Prokar_Lipoprotein |
| | | | 1.118; 1367-1380, | 984-994; |
| | | | 1.117; 88-109, | |
| | | | 1.114; 1322-1331, | |
| | | | 1.111; 372-384, | |
| | | | 1.111; 476-482, | |
| | | | 1.111; 1013-1021, | |
| | | | 1.104; 1141-1147, | |
| | | | 1.101; 218-229, | |
| | | | 1.1; 51-58, | |
| | | | 1.097; 123-134, | |
| | | | 1.097; 488-494, | |
| | | | 1.093; 166-174, | |
| | | | 1.092; 355-361, | |
| | | | 1.09; 1073-1081, | |
| | | | 1.081; 1046-1054, | |
| | | | 1.078; 391-402, | |
| | | | 1.076; 1254-1262, | |
| | | | 1.069; 331-337, | |
| | | | 1.064; 179-185, | |
| | | | 1.061; 891-898, | |
| | | | 1.059; 320-327, | |
| | | | 1.058; 883-889, | |
| | | | 1.055; 281-294, | |
| | | | 1.054 | |
| DEX0374_16.aa.8 | N | 0 -o | 1121-1148, 1.277; | Amidation 345-348, |
| | | | 1023-1061, 1.255; | 660-663; |
| | | | 317-340, 1.234; | Asn_Glycosylation |
| | | | 1158-1182, 1.224; | 109-112, 207-210, 225-228, |
| | | | 1661-1671, 1.221; | 235-238, 241-244, |
| | | | 947-1015, 1.204; | 250-253, 274-277, 349-352, |
| | | | 259-268, 1.204; | 591-594, 851-854; |
| | | | 1292-1308, 1.197; | Camp_Phospho_Site |
| | | | 1490-1507, 1.194; | 597-600; |
| | | | 1602-1620, 1.193; | Ck2_Phospho_Site 42-45, |
| | | | 1065-1111, 1.189; | 85-88, 89-92, 101-104, |
| | | | 1544-1552, 1.185; | 112-115, 114-117, |
| | | | 151-162, 1.183; | 125-128, 132-135, 198-201, |
| | | | 57-81, 1.183; 849-867, | 209-212, 214-217, |
| | | | 1.175; 164-174, | 393-396, 513-516, 518-521, |
| | | | 1.169; 1416-1435, | 537-540, 649-652, |
| | | | 1.169; 818-834, | 677-680, 690-693, 724-727, |
| | | | 1.168; 378-388, | 771-774, 817-820; |
| | | | 1.167; 294-308, | Glycosatminoglycan |
| | | | 1.166; 1437-1450, | 683-686; |
| | | | 1.165; 904-921, | Leucine_Zipper 831-852; |
| | | | 1.164; 772-783, | Myristyl 226-231, |
| | | | 1.164; 752-767, | 242-247, 246-251, |
| | | | 1.16; 1234-1255, | 479-484, 482-487, 569-574, |
| | | | 1.156; 878-889, | 570-575, 590-595, |
| | | | 1.153; 348-365, | 599-604, 670-675, 674-679, |
| | | | 1.15; 1698-1710, | 725-730, 790-795, |
| | | | 1.141; 1734-1746, | 791-796, 943-948, 979-984; |
| | | | 1.131; 1717-1727, | Pkc_Phospho_Site |
| | | | 1.13; 724-733, | 97-99, 114-116, 142-144, |
| | | | 1.127; 188-203, | 143-145, 483-485, |
| | | | 1.127; 41-48, | 506-508, 558-560, 596-598, |
| | | | 1.127; 115-123, | 878-880, 895-897; |
| | | | 1.123; 1344-1357, | Tyr_Phospho_Site 57-65; |
| | | | 1.123; 4-13, | |
| | | | 1.122; 1221-1228, | |
| | | | 1.122; 1752-1768, | |
| | | | 1.12; 1184-1197, | |
| | | | 1.12; 1264-1271, | |
| | | | 1.119; 923-940, | |
| | | | 1.118; 1379-1386, | |
| | | | 1.118; 1683-1696, | |
| | | | 1.117; 404-425, | |
| | | | 1.114; 1638-1647, | |
| | | | 1.111; 688-700, | |
| | | | 1.111; 792-798, | |
| | | | 1.111; 128-138, | |
| | | | 1.11; 1329-1337, | |
| | | | 1.104; 272-279, | |
| | | | 1.103; 1457-1463, | |
| | | | 1.101; 534-545, | |
| | | | 1.1; 367-374, | |
| | | | 1.097; 439-450, | |
| | | | 1.097; 804-810, | |
| | | | 1.093; 482-490, | |
| | | | 1.092; 671-677, | |
| | | | 1.09; 1389-1397, | |
| | | | 1.081; 1362-1370, | |
| | | | 1.078; 143-149, | |
| | | | 1.078; 707-718, | |
| | | | 1.076; 1570-1578, | |
| | | | 1.069; 647-653, | |
| | | | 1.064; 495-501, | |
| | | | 1.061; 1207-1214, | |
| | | | 1.059; 636-643, | |
| | | | 1.058; 1199-1205, | |
| | | | 1.055; 597-610, | |
| | | | 1.054; 26-39, | |
| | | | 1.047 | |
| DEX0374_16.aa.9 | N | 0 -o | 753-780, 1.277; | Amidation 178-181, |
| | | | 655-693, 1.255; | 292-295; |
| | | | 790-814, 1.224; | Asn_Glycosylation 56-59, |
| | | | 1293-1303, 1.221; | 223-226, 483-486, |
| | | | 579-647, 1.204; | 701-704, 935-938, 936-939; |
| | | | 924-940, 1.197; | Camp_Phospho_Site |
| | | | 1122-1139, 1.194; | 12-15, 229-232; |
| | | | 1234-1252, 1.193; | Ck2_Phospho_Site 68-71, |
| | | | 697-743, 1.189; | 93-96, 124-127, |
| | | | 1176-1184, 1.185; | 281-284, 309-312, 322-325, |
| | | | 130-151, 1.179; | 356-359, 403-406, |
| | | | 481-499, 1.175; | 449-452, 652-655, 751-754, |
| | | | 1048-1067, 1.169; | 786-789, 824-827, |
| | | | 450-466, 1.168; | 841-844; |
| | | | 1069-1082, 1.165; | Glycosaminoglycan |
| | | | 536-553, 1.164; | 315-318; |
| | | | 404-415, 1.164; | Leucine_Zipper 463-484; |
| | | | 384-399, 1.16; | Myristyl 48-53, |
| | | | 866-887, 1.156; | 53-58, 109-114, 116-121, |
| | | | 510-521, 1.153; | 129-134, 133-138, |
| | | | 65-79, 1.149; | 137-142, 201-206, 202-207 |
| | | | 1330-1342, 1.141; | 222-227, 231-236, |
| | | | 1366-1378, 1.131; | 302-307, 306-311, 357-362 |
| | | | 1349-1359, 1.13; | 422-427, 423-428, |
| | | | 356-365, 1.127; | 575-580, 611-616, 670-675, |
| | | | 976-989, 1.123; | 807-812, 953-958, |
| | | | 853-860, 1.122; | 954-959, 955-960, 959-964; |
| | | | 1384-1400, 1.12; | Pkc_Phospho_Site |
| | | | 816-829, 1.12; | 9-11, 19-21, 90-92, |
| | | | 896-903, 1.119; | 93-95, 120-122, 190-192, |
| | | | 555-572, 1.118; | 228-230, 510-512, |
| | | | 1011-1018, 1.118; | 527-529, 652-654, 696-698, |
| | | | 1315-1328, 1.117; | 700-702, 790-792, |
| | | | 9-16, 1.115; 1270-1279, | 793-795, 841-843, 853-855, |
| | | | 1.111; 320-332, | 856-858, 975-977; |
| | | | 1.111; 424-430, | Prokar_Lipoprotein |
| | | | 1.111; 19-26, | 932-942; |
| | | | 1.106; 961-969, | |
| | | | 1.104; 1089-1095, | |
| | | | 1.101; 159-172, | |
| | | | 1.093; 436-442, | |
| | | | 1.093; 81-89, | |
| | | | 1.092; 303-309, | |
| | | | 1.09; 1021-1029, | |
| | | | 1.081; 994-1002, | |
| | | | 1.078; 339-350, | |
| | | | 1.076; 1202-1210, | |
| | | | 1.069; 279-285, | |
| | | | 1.064; 839-846, | |
| | | | 1.059; 268-275, | |
| | | | 1.058; 831-837, | |
| | | | 1.055; 229-242, | |
| | | | 1.054 | |
| DEX0374_16.aa.11 | N | 0 -o | 1237-1264, 1.277; | Amidation 461-464, |
| | | | 1139-1177, 1.255; | 776-779; |
| | | | 433-456, 1.234; | Asn_Glycosylation |
| | | | 1274-1298, 1.224; | 225-228, 323-326, 341-344, |
| | | | 1799-1809, 1.221; | 351-354, 357-360, |
| | | | 1063-1131, 1.204; | 366-369, 390-393, 465-468, |
| | | | 375-384, 1.204; | 707-710, 967-970; |
| | | | 1408-1424, 1.197; | Camp_Phospho_Site |
| | | | 1606-1623, 1.194; | 713-716; |
| | | | 1718-1736, 1.193; | Ck2_Phospho_Site 42-45, |
| | | | 1181-1227, 1.189; | 201-204, 205-208, |
| | | | 1660-1668, 1.185; | 217-220, 228-231, 230-233, |
| | | | 267-278, 1.183; | 241-244, 248-251, |
| | | | 57-76, 1.183; 965-983, | 314-317, 325-328, 330-333, |
| | | | 1.175; 280-290, | 509-512, 629-632, |
| | | | 1.169; 1532-1551, | 634-637, 653-656, 765-768, |
| | | | 1.169; 126-134, | 793-796, 806-809, |
| | | | 1.168; 934-950, | 840-843, 887-890, 933-936; |
| | | | 1.168; 494-504 | Glycosaminoglycan |
| | | | 1.167; 410-424, | 799-802; |
| | | | 1.166; 1553-1566, | Leucine_Zipper 947-968; |
| | | | 1.165; 1020-1037, | Myristyl 342-347, |
| | | | 1.164; 888-899, | 358-363, 362-367, |
| | | | 1.164; 868-883, | 595-600, 598-603, 685-690, |
| | | | 1.16; 1350-1371, | 686-691, 706-711, |
| | | | 1.156; 149-168, | 715-720, 786-791, 790-795, |
| | | | 1.155; 994-1005, | 841-846, 906-911, |
| | | | 1.153; 1746-1772, | 907-912; |
| | | | 1.151; 464-481, | Pkc_Phospho_Site 213-215, |
| | | | 1.15; 88-107, | 230-232, 258-260, |
| | | | 1.149; 110-121, | 259-261, 599-601, 622-624, |
| | | | 1.142; 1836-1848, | 674-676, 712-714, |
| | | | 1.141; 1872-1884, | 994-996; |
| | | | 1.131; 1855-1865, | Tyr_Phospho_Site 57-65; |
| | | | 1.13; 840-849, | |
| | | | 1.127; 304-319, | |
| | | | 1.127; 41-48, | |
| | | | 1.127; 231-239, | |
| | | | 1.123; 1460-1473, | |
| | | | 1.123; 4-13, | |
| | | | 1.122; 1337-1344, | |
| | | | 1.122; 189-197, | |
| | | | 1.121; 1890-1906, | |
| | | | 1.12; 1300-1313, | |
| | | | 1.12; 1380-1387, | |
| | | | 1.119; 1039-1056, | |
| | | | 1.118; 1495-1502, | |
| | | | 1.118; 1821-1834, | |
| | | | 1.117; 520-541, | |
| | | | 1.114; 1776-1785, | |
| | | | 1.111; 804-816, | |
| | | | 1.111; 908-914, | |
| | | | 1.111; 244-254, | |
| | | | 1.11; 1445-1453, | |
| | | | 1.104; 388-395, | |
| | | | 1.103; 1573-1579, | |
| | | | 1.101; 650-661, | |
| | | | 1.1; 483-490, | |
| | | | 1.097; 555-566, | |
| | | | 1.097; 920-926, | |
| | | | 1.093; 598-606, | |
| | | | 1.092; 787-793, | |
| | | | 1.09; 1505-1513, | |
| | | | 1.081; 1478-1486, | |
| | | | 1.078; 259-265, | |
| | | | 1.078; 823-834, | |
| | | | 1.076; 1686-1694, | |
| | | | 1.069; 141-147, | |
| | | | 1.068; 763-769, | |
| | | | 1.064; 611-617, | |
| | | | 1.061; 1323-1330, | |
| | | | 1.059; 752-759, | |
| | | | 1.058; 1315-1321, | |
| | | | 1.055; 713-726, | |
| | | | 1.054; 26-39, | |
| | | | 1.047 | |
| DEX0374_16.aa.16 | N | 0 -o | 1237-1264, 1.277; | Amidation 461-464, |
| | | | 1139-1177, 1.255; | 776-779; |
| | | | 433-456, 1.234; | Asn_Glycosylation |
| | | | 1274-1298, 1.224; | 225-228, 323-326, 341-344, |
| | | | 1063-1131, 1.204; | 351-354, 357-360, |
| | | | 375-384, 1.204; | 366-369, 390-393, 465-468, |
| | | | 1408-1424, 1.197; | 707-710, 967-970; |
| | | | 1606-1623, 1.194; | Camp_Phospho_Site |
| | | | 1181-1227, 1.189; | 713-716; |
| | | | 1660-1668, 1.185; | Ck2_Phospho_Site 42-45, |
| | | | 267-278, 1.183; | 201-204, 205-208, |
| | | | 57-76, 1.183; 965-983, | 217-220, 228-231, 230-233, |
| | | | 1.175; 280-290, | 241-244, 248-251, |
| | | | 1.169; 1532-1551, | 314-317, 325-328, 330-333, |
| | | | 1.169; 126-134 | 509-512, 629-632, |
| | | | 1.168; 934-950, | 634-637, 653-656, 765-768, |
| | | | 1.168; 494-504, | 793-796, 806-809, |
| | | | 1.167; 410-424, | 840-843, 887-890, 933-936; |
| | | | 1.166; 1553-1566, | Glycosaminoglycan |
| | | | 1.165; 1020-1037, | 799-802; |
| | | | 1.164; 888-899, | Leucine_Zipper 947-968; |
| | | | 1.164; 868-883, | Myristyl. 342-347, |
| | | | 1.16; 1350-1371, | 358-363, 362-367, |
| | | | 1.156; 149-168, | 595-600, 598-603, 685-690, |
| | | | 1.155; 994-1005, | 686-691, 706-711, |
| | | | 1.153; 464-481, | 715-720, 786-791, 790-795, |
| | | | 1.15; 88-107, | 841-846, 906-911, |
| | | | 1.149; 110-121, | 907-912; |
| | | | 1.142; 1686-1701, | Pkc_Phospho_Site 213-215, |
| | | | 1.141; 840-849, | 230-232, 258-260, |
| | | | 1.127; 304-319, | 259-261, 599-601, 622-624, |
| | | | 1.127; 41-48, | 674-676, 712-714, |
| | | | 1.127; 231-239, | 994-996; |
| | | | 1.123; 1460-1473, | Tyr_Phospho_Site 57-65; |
| | | | 1.123; 4-13, | |
| | | | 1.122; 1337-1344, | |
| | | | 1.122; 189-197, | |
| | | | 1.121; 1300-1313, | |
| | | | 1.12; 1380-1387, | |
| | | | 1.119; 1039-1056, | |
| | | | 1.118; 1495-1502, | |
| | | | 1.118; 520-541, | |
| | | | 1.114; 804-816, | |
| | | | 1.111; 908-914, | |
| | | | 1.111; 244-254, | |
| | | | 1.11; 1445-1453, | |
| | | | 1.104; 388-395, | |
| | | | 1.103; 1573-1579, | |
| | | | 1.101; 650-661, | |
| | | | 1.1; 483-490, | |
| | | | 1.097; 555-566, | |
| | | | 1.097; 920-926, | |
| | | | 1.093; 598-606, | |
| | | | 1.092; 787-793, | |
| | | | 1.09; 1505-1513, | |
| | | | 1.081; 1478-1486, | |
| | | | 1.078; 259-265, | |
| | | | 1.078; 823-834, | |
| | | | 1.076; 141-147, | |
| | | | 1.068; 763-769, | |
| | | | 1.064; 611-617, | |
| | | | 1.061; 1323-1330, | |
| | | | 1.059; 752-759, | |
| | | | 1.058; 1315-1321, | |
| | | | 1.055; 713-726, | |
| | | | 1.054; 26-39, | |
| | | | 1.047 | |
| DEX0374_16.aa.17 | N | 0 -o | 1139-1177, 1.255; | Amidation 461-464, |
| | | | 433-456, 1.234; | 776-779; |
| | | | 1063-1131, 1.204; | Asn_Glycosylation |
| | | | 375-384, 1.204; | 225-228, 323-326, 341-344, |
| | | | 1181-1227, 1.189; | 351-354, 357-360, |
| | | | 267-278, 1.183; | 366-369, 390-393, 465-468, |
| | | | 57-76, 1.183; 965-983, | 707-710, 967-970; |
| | | | 1.175; 280-290, | Camp_Phospho_Site |
| | | | 1.169; 126-134, | 713-716; |
| | | | 1.168; 934-950, | Ck2_Phospho_Site 42-45, |
| | | | 1.168; 494-504, | 201-204, 205-208, |
| | | | 1.167; 410-424, | 217-220, 228-231, 230-233 |
| | | | 1.166; 1020-1037, | 241-244, 248-251, |
| | | | 1.164; 888-899, | 314-317, 325-328, 330-333, |
| | | | 1.164; 868-883, | 509-512, 629-632, |
| | | | 1.16; 149-168, | 634-637, 653-656, 765-768, |
| | | | 1.155; 994-1005, | 793-796, 806-809, |
| | | | 1.153; 464-481, | 840-843, 887-890, 933-936; |
| | | | 1.15; 88-107, | Glycosaminoglycan |
| | | | 1.149; 110-121, | 799-802; |
| | | | 1.142; 840-849, | Leucine_Zipper 947-968; |
| | | | 1.127; 304-319, | Myristyl 342-347, |
| | | | 1.127; 41-48, | 358-363, 362-367, |
| | | | 1.127; 231-239, | 595-600, 598-603, 685-690, |
| | | | 1.123; 4-13, | 686-691, 706-711, |
| | | | 1.122; 189-197, | 715-720, 786-791, 790-795, |
| | | | 1.121; 1039-1056, | 841-846, 906-911, |
| | | | 1.118; 520-541, | 907-912; |
| | | | 1.114; 804-816, | Pkc_Phospho_Site 213-215, |
| | | | 1.111; 908-914, | 230-232, 258-260, |
| | | | 1.111; 244-254, | 259-261, 599-601, 622-624, |
| | | | 1.11; 388-395, | 674-676, 712-714, |
| | | | 1.103; 650-661, | 994-996; |
| | | | 1.1; 483-490, | Tyr_Phospho_Site 57-65; |
| | | | 1.097; 555-566, | |
| | | | 1.097; 920-926, | |
| | | | 1.093; 598-606, | |
| | | | 1.092; 787-793, | |
| | | | 1.09; 259-265, | |
| | | | 1.078; 823-834, | |
| | | | 1.076; 141-147, | |
| | | | 1.068; 763-769, | |
| | | | 1.064; 611-617, | |
| | | | 1.061; 752-759, | |
| | | | 1.058; 713-726, | |
| | | | 1.054; 26-39, | |
| | | | 1.047 | |
| DEX0374_16.aa.18 | N | 0 -o | 433-456, 1.234; | Amidation 461-464, |
| | | | 375-384, 1.204; | 776-779; |
| | | | 823-846, 1.187; | Asn_Glycosylation |
| | | | 267-278, 1.183; | 225-228, 323-326, 341-344, |
| | | | 57-76, 1.183; 280-290, | 351-354, 357-360, |
| | | | 1.169; 126-134, | 366-369, 390-393, 465-468, |
| | | | 1.168; 494-504, | 707-710; |
| | | | 1.167; 410-424, | Camp_Phospho_Site |
| | | | 1.166; 149-168, | 713-716; |
| | | | 1.155; 464-481, | Ck2_Phospho_Site 42-45, |
| | | | 1.15; 88-107, | 201-204, 205-208, |
| | | | 1.149; 110-121, | 217-220, 228-231, 230-233, |
| | | | 1.142; 304-319, | 241-244, 248-251, |
| | | | 1.127; 41-48, | 314-317, 325-328, 330-333, |
| | | | 1.127; 231-239, | 509-512, 629-632, |
| | | | 1.123; 4-13, | 634-637, 653-656, 765-768, |
| | | | 1.122; 189-197, | 793-796, 806-809; |
| | | | 1.121; 520-541, | Glycosaminoglycan |
| | | | 1.114; 804-816, | 799-802; Myristyl |
| | | | 1.111; 244-254, | 342-347, 358-363, 362-367, |
| | | | 1.11; 388-395, | 595-600, 598-603, |
| | | | 1.103; 650-661, | 685-690, 686-691, 706-711, |
| | | | 1.1; 483-490, | 715-720, 786-791, |
| | | | 1.097; 555-566, | 790-795; |
| | | | 1.097; 598-606, | Pkc_Phospho_Site 213-215, |
| | | | 1.092; 787-793, | 230-232, 258-260, |
| | | | 1.09; 259-265, | 259-261, 599-601, 622-624, |
| | | | 1.078; 141-147, | 674-676, 712-714, |
| | | | 1.068; 763-769, | 840-842; |
| | | | 1.064; 611-617, | Tyr_Phospho_Site 57-65; |
| | | | 1.061; 752-759, | |
| | | | 1.058; 713-726, | |
| | | | 1.054; 26-39, | |
| | | | 1.047 | |
| DEX0374_16.aa.20 | N | 0 -o | 259-281, 1.186; | Asn_Glycosylation |
| | | | 57-76, 1.183; 126-134, | 225-228; |
| | | | 1.168; 149-168, | Ck2_Phospho_Site 42-45, |
| | | | 1.155; 88-107, | 201-204, 205-208, |
| | | | 1.149; 110-121, | 217-220, 228-231, 230-233, |
| | | | 1.142; 41-48, | 241-244, 248-251; |
| | | | 1.127; 231-239, | Pkc_Phospho_Site 213-215, |
| | | | 1.123; 4-13, | 230-232, 258-260, |
| | | | 1.122; 189-197, | 259-261; |
| | | | 1.121; 244-254, | Tyr_Phospho_Site 57-65; |
| | | | 1.11; 141-147, | |
| | | | 1.068; 26-39, | |
| | | | 1.047 | |
| DEX0374_16.aa.21 | N | 0 -o | 433-456, 1.234; | Amidation 461-464; |
| | | | 375-384, 1.204; | Asn_Glycosylation |
| | | | 267-278, 1.183; | 225-228, 323-326, 341-344, |
| | | | 57-76, 1.183; 280-290, | 351-354, 357-360, |
| | | | 1.169; 126-134, | 366-369, 390-393, 465-468; |
| | | | 1.168; 494-504, | Ck2_Phospho_Site |
| | | | 1.167; 410-424, | 42-45, 201-204, 205-208, |
| | | | 1.166; 149-168, | 217-220, 228-231, |
| | | | 1.155; 464-481, | 230-233, 241-244, 248-251, |
| | | | 1.15; 88-107, | 314-317, 325-328, |
| | | | 1.149; 110-121, | 330-333, 509-512; |
| | | | 1.142; 304-319, | Myristyl 342-347, |
| | | | 1.127; 41-48, | 358-363, 362-367, 595-600, |
| | | | 1.127; 231-239, | 598-603; |
| | | | 1.123; 4-13, | Pkc_Phospho_Site 213-215, |
| | | | 1.122; 189-197, | 230-232, 258-260, |
| | | | 1.121; 520-541, | 259-261, 599-601; |
| | | | 1.114; 244-254, | Tyr_Phospho_Site 57-65; |
| | | | 1.11; 388-395, | |
| | | | 1.103; 483-490, | |
| | | | 1.097; 555-566, | |
| | | | 1.097; 598-604, | |
| | | | 1.092; 259-265, | |
| | | | 1.078; 141-147, | |
| | | | 1.068; 26-39, | |
| | | | 1.047 | |
| DEX0374_16.aa.22 | N | 0 -o | 1284-1311, 1.277; | Amidation 461-464, |
| | | | 1186-1224, 1.255; | 823-826; |
| | | | 433-456, 1.234; | Asn_Glycosylation |
| | | | 1321-1345, 1.224; | 225-228, 323-326, 341-344, |
| | | | 1824-1834, 1.221; | 351-354, 357-360, |
| | | | 1110-1178, 1.204; | 366-369, 390-393, 465-468, |
| | | | 375-384, 1.204; | 754-757; |
| | | | 1455-1471, 1.197; | Camp_Phospho_Site |
| | | | 1653-1670, 1.194; | 760-763; |
| | | | 1765-1783, 1.193; | Ck2_Phospho_Site 42-45, |
| | | | 1228-1274, 1.189; | 201-204, 205-208, |
| | | | 1707-1715, 1.185; | 217-220, 228-231, 230-233, |
| | | | 267-278, 1.183; | 241-244, 248-251, |
| | | | 57-76, 1.183; | 314-317, 325-328, 330-333, |
| | | | 1012-1030, 1.175; | 509-512, 617-620, |
| | | | 280-290, 1.169; | 658-661, 676-679, 681-684, |
| | | | 1579-1598, 1.169; | 700-703, 812-815, |
| | | | 126-134, 1.168; | 840-843, 853-856, 887-890, |
| | | | 981-997, 1.168; | 934-937, 980-983; |
| | | | 494-504, 1.167; | Glycosaminoglycan |
| | | | 410-424, 1.166; | 846-849; |
| | | | 1600-1613, 1.165; | Leucine_Zipper 994-1015; |
| | | | 1067-1084, 1.164; | Myristyl 342-347, |
| | | | 935-946, 1.164; | 358-363, 362-367, |
| | | | 915-930, 1.16; | 595-600, 598-603, 732-737, |
| | | | 1397-1418, 1.156; | 733-738, 753-758, |
| | | | 149-168, 1.155; | 762-767, 833-838, 837-842, |
| | | | 1041-1052, 1.153; | 888-893, 953-958, |
| | | | 613-652, 1.151; | 954-959; |
| | | | 464-481, 1.15; 88-107, | Pkc_Phospho_Site 213-215, |
| | | | 1.149; 110-121, | 230-232, 258-260, |
| | | | 1.142; 1861-1873, | 259-261, 599-601, 630-632, |
| | | | 1.141; 1897-1909, | 640-642, 669-671, |
| | | | 1.131; 1880-1890, | 721-723, 759-761; |
| | | | 1.13; 887-896, | Tyr_Phospho_Site 57-65; |
| | | | 1.127; 304-319, | |
| | | | 1.127; 41-48, | |
| | | | 1.127; 231-239, | |
| | | | 1.123; 1507-1520, | |
| | | | 1.123; 4-13, | |
| | | | 1.122; 1384-1391, | |
| | | | 1.122; 189-197, | |
| | | | 1.121; 1915-1931, | |
| | | | 1.12; 1347-1360, | |
| | | | 1.12; 1427-1434, | |
| | | | 1.119; 1086-1103, | |
| | | | 1.118; 1542-1549, | |
| | | | 1.118; 1846-1859, | |
| | | | 1.117; 520-541, | |
| | | | 1.114; 1801-1810, | |
| | | | 1.111; 851-863, | |
| | | | 1.111; 955-961, | |
| | | | 1.111; 244-254, | |
| | | | 1.11; 1492-1500, | |
| | | | 1.104; 388-395, | |
| | | | 1.103; 1620-1626, | |
| | | | 1.101; 697-708, | |
| | | | 1.1; 483-490, | |
| | | | 1.097; 555-566, | |
| | | | 1.097; 967-973, | |
| | | | 1.093; 598-606, | |
| | | | 1.092; 834-840, | |
| | | | 1.09; 1552-1560, | |
| | | | 1.081; 1525-1533, | |
| | | | 1.078; 259-265, | |
| | | | 1.078; 870-881, | |
| | | | 1.076; 1733-1741, | |
| | | | 1.069; 141-147, | |
| | | | 1.068; 810-816, | |
| | | | 1.064; 658-664, | |
| | | | 1.061; 1370-1377, | |
| | | | 1.059; 799-806, | |
| | | | 1.058; 1362-1368, | |
| | | | 1.055; 760-773, | |
| | | | 1.054; 26-39, | |
| | | | 1.047 | |
| DEX0374_16.aa.23 | N | 0 -o | 570-597, 1.277; | Amidation 109-112; |
| | | | 472-510, 1.255; | Asn_Glycosylation 40-43, |
| | | | 607-631, 1.224; | 300-303, 518-521, |
| | | | 1110-1120, 1.221; | 752-755, 753-756; |
| | | | 396-464, 1.204; | Camp_Phospho_Site 46-49, |
| | | | 741-757, 1.197; | 968-971; |
| | | | 939-956, 1.194; | Ck2_Phospho_Site 98-101, |
| | | | 1051-1069, 1.193; | 126-129, 139-142, |
| | | | 514-560, 1.189; | 173-176, 220-223, 266-269, |
| | | | 993-1001, 1.185; | 469-472, 568-571, |
| | | | 298-316, 1.175; | 603-606, 641-644, 658-661, |
| | | | 865-884, 1.169; | 822-825, 832-835, |
| | | | 267-283, 1.168; | 841-844, 862-865, 880-883; |
| | | | 886-899, 1.165; | Glycosaminoglycan |
| | | | 353-370, 1.164; | 132-135; |
| | | | 221-232, 1.164; | Leucine_Zipper 280-301; |
| | | | 201-216, 1.16; | Myristyl 18-23, |
| | | | 683-704, 1.156; | 19-24, 39-44, 48-53, |
| | | | 327-338, 1.153; | 119-124, 123-128, 174-179, |
| | | | 1147-1159, 1.141; | 239-244, 240-245, |
| | | | 1183-1195, 1.131; | 392-397, 428-433, 487-492, |
| | | | 1166-1176, 1.13; | 624-629, 770-775, |
| | | | 173-182, 1.127; | 771-776, 772-777, 776-781, |
| | | | 793-806, 1.123; | 889-894; |
| | | | 670-677, 1.122; | Pkc_Phospho_Site 3-5, |
| | | | 1201-1217, 1.12; | 45-47, 327-329, 344-346, |
| | | | 633-646, 1.12; | 469-471, 513-515, |
| | | | 713-720, 1.119; | 517-519, 607-609, 610-612, |
| | | | 372-389, 1.118; | 658-660, 670-672, |
| | | | 828-835, 1.118; | 673-675, 792-794, 841-843, |
| | | | 1132-1145, 1.117; | 862-864, 903-905, |
| | | | 1087-1096, 1.111; | 996-998; |
| | | | 137-149, 1.111; | Prokar_Lipoprotein |
| | | | 241-247, 1.111; | 749-759; |
| | | | 778-786, 1.104; | |
| | | | 906-912, 1.101; | |
| | | | 253-259, 1.093; | |
| | | | 120-126, 1.09; | |
| | | | 838-846, 1.081; | |
| | | | 811-819, 1.078; | |
| | | | 156-167, 1.076; | |
| | | | 1019-1027, 1.069; | |
| | | | 96-102, 1.064; | |
| | | | 656-663, 1.059; | |
| | | | 85-92, 1.058; 648-654, | |
| | | | 1.055; 46-59, | |
| | | | 1.054 | |
| DEX0374_16.aa.24 | N | 0 -o | 433-456, 1.234; | Amidation 461-464, |
| | | | 1063-1123, 1.204; | 776-779; |
| | | | 375-384, 1.204; | Asn_Glycosylation |
| | | | 267-278, 1.183; | 225-228, 323-326, 341-344, |
| | | | 57-76, 1.183; 965-983, | 351-354, 357-360, |
| | | | 1.175; 280-290, | 366-369, 390-393, 465-468, |
| | | | 1.169; 126-134, | 707-710, 967-970; |
| | | | 1.168; 934-950, | Camp_Phospho_Site |
| | | | 1.168; 494-504, | 713-716; |
| | | | 1.167; 410-424, | Ck2_Phospho_Site 42-45, |
| | | | 1.166; 1020-1037, | 201-204, 205-208, |
| | | | 1.164; 888-899, | 217-220, 228-231, 230-233, |
| | | | 1.164; 868-883, | 241-244, 248-251, |
| | | | 1.16; 149-168, | 314-317, 325-328, 330-333, |
| | | | 1.155; 994-1005, | 509-512, 629-632, |
| | | | 1.153; 464-481, | 634-637, 653-656, 765-768, |
| | | | 1.15; 88-107, | 793-796, 806-809, |
| | | | 1.149; 110-121, | 840-843, 887-890, 933-936; |
| | | | 1.142; 840-849, | Glycosaminoglycan |
| | | | 1.127; 304-319, | 799-802; |
| | | | 1.127; 41-48, | Leucine_Zipper 947-968; |
| | | | 1.127; 231-239 | 968; Myristyl 342-347, |
| | | | 1.123; 4-13, | 358-363, 362-367, |
| | | | 1.122; 189-197, | 595-600, 598-603, 685-690, |
| | | | 1.121; 1039-1056, | 686-691, 706-711, |
| | | | 1.118; 520-541, | 715-720, 786-791, 790-795, |
| | | | 1.114; 804-816, | 841-846, 906-911, |
| | | | 1.111; 908-914, | 907-912; |
| | | | 1.111; 244-254, | Pkc_Phospho_Site 213-215, |
| | | | 1.11; 388-395, | 230-232, 258-260, |
| | | | 1.103; 650-661, | 259-261, 599-601, 622-624, |
| | | | 1.1; 483-490, | 674-676, 712-714, |
| | | | 1.097; 555-566, | 994-996; |
| | | | 1.097; 920-926, | Tyr_Phospho_Site 57-65; |
| | | | 1.093; 598-606, | |
| | | | 1.092; 787-793, | |
| | | | 1.09; 259-265, | |
| | | | 1.078; 823-834, | |
| | | | 1.076; 141-147, | |
| | | | 1.068; 763-769, | |
| | | | 1.064; 611-617, | |
| | | | 1.061; 752-759, | |
| | | | 1.058; 713-726, | |
| | | | 1.054; 26-39, | |
| | | | 1.047 | |
| DEX0374_16.aa.25 | N | 0 -o | 1237-1264, 1.277; | Amidation 461-464, |
| | | | 1139-1177, 1.255; | 776-779; |
| | | | 433-456, 1.234; | Asn_Glycosylation |
| | | | 1274-1298, 1.224; | 225-228, 323-326, 341-344, |
| | | | 1777-1787, 1.221; | 351-354, 357-360, |
| | | | 1063-1131, 1.204; | 366-369, 390-393, 465-468, |
| | | | 375-384, 1.204; | 707-710, 967-970; |
| | | | 1408-1424, 1.197; | Camp_Phospho_Site |
| | | | 1606-1623, 1.194; | 713-716; |
| | | | 1718-1736, 1.193; | Ck2_Phospho_Site 42-45, |
| | | | 1181-1227, 1.189; | 201-204, 205-208, |
| | | | 1660-1668, 1.185; | 217-220, 228-231, 230-233, |
| | | | 267-278, 1.183; | 241-244, 248-251, |
| | | | 57-76, 1.183; 965-983, | 314-317, 325-328, 330-333, |
| | | | 1.175; 280-290, | 509-512, 629-632, |
| | | | 1.169; 1532-1551, | 634-637, 653-656, 765-768, |
| | | | 1.169; 126-134, | 793-796, 806-809, |
| | | | 1.168; 934-950, | 840-843, 887-890, 933-936; |
| | | | 1.168; 494-504, | Glycosaminoglycan |
| | | | 1.167; 410-424, | 799-802; |
| | | | 1.166; 1553-1566, | Leucine_Zipper 947-968; |
| | | | 1.165; 1020-1037, | Myristyl 342-347, |
| | | | 1.164; 888-899, | 358-363, 362-367, |
| | | | 1.164; 868-883, | 595-600, 598-603, 685-690, |
| | | | 1.16; 1350-1371, | 686-691, 706-711, |
| | | | 1.156; 149-168, | 715-720, 786-791, 790-795, |
| | | | 1.155; 994-1005, | 841-846, 906-911, |
| | | | 1.153; 464-481, | 907-912; |
| | | | 1.15; 88-107, | Pkc_Phospho_Site 213-215, |
| | | | 1.149; 110-121, | 230-232, 258-260, |
| | | | 1.142; 1814-1826 | 259-261, 599-601, 622-624 |
| | | | 1.141; 1850-1862, | 674-676, 712-714, |
| | | | 1.131; 1833-1843, | 994-996; |
| | | | 1.13; 840-849, | Tyr_Phospho_Site 57-65; |
| | | | 1.127; 304-319, | |
| | | | 1.127; 41-48, | |
| | | | 1.127; 231-239, | |
| | | | 1.123; 1460-1473, | |
| | | | 1.123; 4-13, | |
| | | | 1.122; 1337-1344, | |
| | | | 1.122; 189-197, | |
| | | | 1.121; 1868-1890, | |
| | | | 1.12; 1300-1313, | |
| | | | 1.12; 1380-1387, | |
| | | | 1.119; 1039-1056, | |
| | | | 1.118; 1495-1502, | |
| | | | 1.118; 1799-1812, | |
| | | | 1.117; 520-541, | |
| | | | 1.114; 1754-1763, | |
| | | | 1.111; 804-816, | |
| | | | 1.111; 908-914, | |
| | | | 1.111; 244-254, | |
| | | | 1.11; 1445-1453, | |
| | | | 1.104; 388-395, | |
| | | | 1.103; 1573-1579, | |
| | | | 1.101; 650-661, | |
| | | | 1.1; 483-490, | |
| | | | 1.097; 555-566, | |
| | | | 1.097; 920-926, | |
| | | | 1.093; 598-606, | |
| | | | 1.092; 787-793, | |
| | | | 1.09; 1505-1513, | |
| | | | 1.081; 1478-1486, | |
| | | | 1.078; 259-265, | |
| | | | 1.078; 823-834, | |
| | | | 1.076; 1686-1694 | |
| | | | 1.069; 141-147, | |
| | | | 1.068; 763-769, | |
| | | | 1.064; 611-617, | |
| | | | 1.061; 1323-1330, | |
| | | | 1.059; 752-759, | |
| | | | 1.058; 1315-1321, | |
| | | | 1.055; 713-726, | |
| | | | 1.054; 26-39, | |
| | | | 1.047 | |
| DEX0374_16.aa.26 | N | 0 -o | 1237-1264, 1.277; | Amidation 461-464, |
| | | | 1139-1177, 1.255; | 776-779; |
| | | | 433-456, 1.234; | Asn_GlyCosylation |
| | | | 1274-1298, 1.224; | 225-228, 323-326, 341-344, |
| | | | 1757-1767, 1.221; | 351-354, 357-360, |
| | | | 1063-1131, 1.204; | 366-369, 390-393, 465-468, |
| | | | 375-384, 1.204; | 707-710, 967-970; |
| | | | 1408-1424, 1.197; | Camp_Phospho_Site |
| | | | 1606-1623, 1.194; | 713-716; |
| | | | 1181-1227, 1.189; | Ck2_Phospho_Site 42-45, |
| | | | 1660-1668, 1.185; | 201-204, 205-208, |
| | | | 267-278, 1.183; | 217-220, 228-231, 230-233, |
| | | | 57-76, 1.183; 965-983, | 241-244, 248-251, |
| | | | 1.175; 280-290, | 314-317, 325-328, 330-333, |
| | | | 1.169; 1532-1551, | 509-512, 629-632, |
| | | | 1.169; 126-134, | 634-637, 653-656, 765-768, |
| | | | 1.168; 934-950, | 793-796, 806-809, |
| | | | 1.168; 494-504, | 840-843, 887-890, 933-936; |
| | | | 1.167; 410-424, | Glycosaminoglycan |
| | | | 1.166; 1553-1566, | 799-802; |
| | | | 1.165; 1020-1037, | Leucine_Zipper 947-968; |
| | | | 1.164; 888-899, | Myristyl 342-347, |
| | | | 1.164; 868-883, | 358-363, 362-367, |
| | | | 1.16; 1350-1371, | 595-600, 598-603, 685-690, |
| | | | 1.156; 149-168, | 686-691, 706-711, |
| | | | 1.155; 994-1005, | 715-720, 786-791, 790-795, |
| | | | 1.153; 464-481, | 841-846, 906-911, |
| | | | 1.15; 88-107, | 907-912; |
| | | | 1.149; 110-121, | Pkc_Phospho_Site 213-215, |
| | | | 1.142; 1794-1806, | 230-232, 258-260, |
| | | | 1.141; 1830-1842, | 259-261, 599-601, 622-624, |
| | | | 1.131; 1813-1823, | 674-676, 712-714, |
| | | | 1.13; 840-849, | 994-996; |
| | | | 1.127; 304-319, | Tyr_Phospho_Site 57-65; |
| | | | 1.127; 41-48, | |
| | | | 1.127; 231-239, | |
| | | | 1.123; 1460-1473, | |
| | | | 1.123; 4-13, | |
| | | | 1.122; 1337-1344, | |
| | | | 1.122; 189-197, | |
| | | | 1.121; 1848-1864, | |
| | | | 1.12; 1300-1313, | |
| | | | 1.12; 1380-1387, | |
| | | | 1.119; 1039-1056, | |
| | | | 1.118; 1495-1502, | |
| | | | 1.118; 1779-1792, | |
| | | | 1.117; 520-541, | |
| | | | 1.114; 1734-1743, | |
| | | | 1.111; 804-816, | |
| | | | 1.111; 908-914, | |
| | | | 1.111; 244-254, | |
| | | | 1.11; 1445-1453, | |
| | | | 1.104; 388-395, | |
| | | | 1.103; 1573-1579, | |
| | | | 1.101; 650-661, | |
| | | | 1.1; 483-490, | |
| | | | 1.097; 555-566, | |
| | | | 1.097; 920-926, | |
| | | | 1.093; 598-606, | |
| | | | 1.092; 787-793, | |
| | | | 1.09; 1718-1730, | |
| | | | 1.089; 1505-1513, | |
| | | | 1.081; 1478-1486, | |
| | | | 1.078; 259-265, | |
| | | | 1.078; 823-834, | |
| | | | 1.076; 1686-1694, | |
| | | | 1.069; 141-147, | |
| | | | 1.068; 763-769, | |
| | | | 1.064; 611-617, | |
| | | | 1.061; 1323-1330, | |
| | | | 1.059; 752-759, | |
| | | | 1.058; 1315-1321, | |
| | | | 1.055; 713-726, | |
| | | | 1.054; 26-39, | |
| | | | 1.047 | |
| DEX0374_16.aa.27 | N | 0 -o | 1237-1264, 1.277; | Amidation 461-464, |
| | | | 1139-1177, 1.255; | 776-779; |
| | | | 1850-1874, 1.248; | Asn_Glycosylation |
| | | | 433-456, 1.234; | 225-228, 323-326, 341-344, |
| | | | 1274-1298, 1.224; | 351-354, 357-360, |
| | | | 1777-1787, 1.221; | 366-369, 390-393, 465-468, |
| | | | 1063-1131, 1.204; | 707-710, 967-970; |
| | | | 375-384, 1.204; | Camp_Phospho_Site |
| | | | 1408-1424, 1.197; | 713-716; |
| | | | 1606-1623, 1.194; | Ck2_Phospho_Site 42-45, |
| | | | 1718-1736, 1.193; | 201-204, 205-208, |
| | | | 1181-1227, 1.189; | 217-220, 228-231, 230-233, |
| | | | 1660-1668, 1.185; | 241-244, 248-251, |
| | | | 267-278, 1.183; | 314-317, 325-328, 330-333, |
| | | | 57-76, 1.183; 965-983, | 509-512, 629-632, |
| | | | 1.175; 280-290, | 634-637, 653-656, 765-768, |
| | | | 1.169; 1532-1551, | 793-796, 806-809, |
| | | | 1.169; 126-134, | 840-843, 887-890, 933-936; |
| | | | 1.168; 934-950, | Glycosaminoglycan |
| | | | 1.168; 494-504, | 799-802; |
| | | | 1.167; 410-424, | Leucine_Zipper 947-968; |
| | | | 1.166; 1553-1566, | Myristyl 342-347, |
| | | | 1.165; 1020-1037, | 358-363, 362-367, |
| | | | 1.164; 888-899, | 595-600, 598-603, 685-690, |
| | | | 1.164; 868-883, | 686-691, 706-711, |
| | | | 1.16; 1350-1371, | 715-720, 786-791, 790-795, |
| | | | 1.156; 149-168, | 841-846, 906-911, |
| | | | 1.155; 994-1005, | 907-912; |
| | | | 1.153; 464-481, | Pkc_Phospho_Site 213-215, |
| | | | 1.15; 88-107, | 230-232, 258-260, |
| | | | 1.149; 110-121, | 259-261, 599-601, 622-624, |
| | | | 1.142; 1814-1826, | 674-676, 712-714, |
| | | | 1.141; 1833-1843, | 994-996; |
| | | | 1.13; 840-849, | Tyr_Phospho_Site 57-65; |
| | | | 1.127; 304-319, | |
| | | | 1.127; 41-48, | |
| | | | 1.127; 231-239, | |
| | | | 1.123; 1460-1473, | |
| | | | 1.123; 4-13, | |
| | | | 1.122; 1337-1344, | |
| | | | 1.122; 189-197, | |
| | | | 1.121; 1880-1902, | |
| | | | 1.12; 1300-1313, | |
| | | | 1.12; 1380-1387, | |
| | | | 1.119; 1039-1056, | |
| | | | 1.118; 1495-1502, | |
| | | | 1.118; 1799-1812, | |
| | | | 1.117; 520-541, | |
| | | | 1.114; 1754-1763, | |
| | | | 1.111; 804-816, | |
| | | | 1.111; 908-914, | |
| | | | 1.111; 244-254, | |
| | | | 1.11; 1445-1453, | |
| | | | 1.104; 388-395, | |
| | | | 1.103; 1573-1579, | |
| | | | 1.101; 650-661, | |
| | | | 1.1; 483-490, | |
| | | | 1.097; 555-566, | |
| | | | 1.097; 920-926, | |
| | | | 1.093; 598-606, | |
| | | | 1.092; 787-793, | |
| | | | 1.09; 1505-1513, | |
| | | | 1.081; 1478-1486, | |
| | | | 1.078; 259-265, | |
| | | | 1.078; 823-834, | |
| | | | 1.076; 1686-1694, | |
| | | | 1.069; 141-147, | |
| | | | 1.068; 763-769, | |
| | | | 1.064; 611-617, | |
| | | | 1.061; 1323-1330, | |
| | | | 1.059; 752-759, | |
| | | | 1.058; 1315-1321, | |
| | | | 1.055; 713-726, | |
| | | | 1.054; 26-39, | |
| | | | 1.047 | |
| DEX0374_16.aa.28 | N | 0 -o | 1237-1264, 1.277; | Amidation 461-464, |
| | | | 1139-1177, 1.255; | 776-779; |
| | | | 433-456, 1.234; | Asn_Glycosylation |
| | | | 1274-1298, 1.224; | 225-228, 323-326, 341-344, |
| | | | 1777-1787, 1.221; | 351-354, 357-360, |
| | | | 1063-1131, 1.204; | 366-369, 390-393, 465-468, |
| | | | 375-384, 1.204; | 707-710, 967-970; |
| | | | 1408-1424, 1.197; | Camp_Phospho_Site |
| | | | 1606-1623, 1.194; | 713-716; |
| | | | 1718-1736, 1.193; | Ck2_Phospho_Site 42-45, |
| | | | 1181-1227, 1.189; | 201-204, 205-208, |
| | | | 1660-1668, 1.185; | 217-220, 228-231, 230-233, |
| | | | 267-278, 1.183; | 241-244, 248-251, |
| | | | 57-76, 1.183; 965-983, | 314-317, 325-328, 330-333, |
| | | | 1.175; 1833-1862, | 509-512, 629-632, |
| | | | 1.171; 280-290, | 634-637, 653-656, 765-768, |
| | | | 1.169; 1532-1551, | 793-796, 806-809, |
| | | | 1.169; 126-134, | 840-843, 887-890, 933-936; |
| | | | 1.168; 934-950, | Glycosaminoglycan |
| | | | 1.168; 494-504, | 799-802; |
| | | | 1.167; 410-424, | Leucine_Zipper 947-968; |
| | | | 1.166; 1553-1566, | Myristyl 342-347, |
| | | | 1.165; 1020-1037, | 358-363, 362-367, |
| | | | 1.164; 888-899, | 595-600, 598-603, 685-690, |
| | | | 1.164; 868-883, | 686-691, 706-711, |
| | | | 1.16; 1350-1371, | 715-720, 786-791, 790-975, |
| | | | 1.156; 149-168, | 795, 841-846, 906-911, |
| | | | 1.155; 994-1005, | 907-912; |
| | | | 1.153; 464-481, | Pkc_Phospho_Site 213-215, |
| | | | 1.15; 88-107, | 230-232, 258-260, |
| | | | 1.149; 110-121, | 259-261, 599-601, 622-624, |
| | | | 1.142; 1814-1826, | 674-676, 712-714, |
| | | | 1.141; 840-849, | 994-996; |
| | | | 1.127; 304-319, | Tyr_Phospho_Site 57-65; |
| | | | 1.127; 41-48, | |
| | | | 1.127; 231-239, | |
| | | | 1.123; 1460-1473, | |
| | | | 1.123; 4-13, | |
| | | | 1.122; 1337-1344, | |
| | | | 1.122; 189-197, | |
| | | | 1.121; 1300-1313, | |
| | | | 1.12; 1380-1387, | |
| | | | 1.119; 1039-1056, | |
| | | | 1.118; 1495-1502, | |
| | | | 1.118; 1799-1812, | |
| | | | 1.117; 520-541, | |
| | | | 1.114; 1754-1763, | |
| | | | 1.111; 804-816, | |
| | | | 1.111; 908-914, | |
| | | | 1.111; 244-254, | |
| | | | 1.11; 1445-1453, | |
| | | | 1.104; 388-395, | |
| | | | 1.103; 1573-1579, | |
| | | | 1.101; 650-661, | |
| | | | 1.1; 483-490, | |
| | | | 1.097; 555-566, | |
| | | | 1.097; 920-926, | |
| | | | 1.093; 598-606, | |
| | | | 1.092; 787-793, | |
| | | | 1.09; 1505-1513, | |
| | | | 1.081; 1478-1486, | |
| | | | 1.078; 259-265, | |
| | | | 1.078; 823-834, | |
| | | | 1.076; 1686-1694, | |
| | | | 1.069; 141-147, | |
| | | | 1.068; 1877-1884, | |
| | | | 1.065; 763-769, | |
| | | | 1.064; 611-617, | |
| | | | 1.061; 1323-1330, | |
| | | | 1.059; 752-759, | |
| | | | 1.058; 1315-1321, | |
| | | | 1.055; 713-726, | |
| | | | 1.054; 26-39, | |
| | | | 1.047 | |
| DEX0374_16.aa.29 | N | 0 -o | 433-456, 1.234; | Amidation 461-464; |
| | | | 375-384, 1.204; | Asn_Glycosylation |
| | | | 267-278, 1.183; | 225-228, 323-326, 341-344, |
| | | | 57-76, 1.183; 704-727, | 351-354, 357-360, |
| | | | 1.177; 280-290, | 366-369, 390-393, 465-468, |
| | | | 1.169; 126-134, | 762-765, 766-769, |
| | | | 1.168; 494-504, | 803-806, 832-835; |
| | | | 1.167; 410-424, | Ck2_Phospho_Site 42-45, |
| | | | 1.166; 149-168, | 201-204, 205-208, |
| | | | 1.155; 464-481, | 217-220, 228-231, 230-233, |
| | | | 1.15; 88-107, | 241-244, 248-251, |
| | | | 1.149; 110-121, | 314-317, 325-328, 330-333, |
| | | | 1.142; 661-671, | 509-512, 629-632, |
| | | | 1.132; 304-319, | 634-637, 653-656, 685-688, |
| | | | 1.127; 41-48, | 708-711, 715-718, |
| | | | 1.127; 231-239, | 732-735, 751-754, 764-767, |
| | | | 1.123; 4-13, | 768-771, 795-798, |
| | | | 1.122; 189-197, | 799-802, 862-865; |
| | | | 1.121; 520-541, | Myristyl 342-347, |
| | | | 1.114; 244-254, | 358-363, 362-367, 595-600, |
| | | | 1.11; 769-776, | 598-603, 809-814; |
| | | | 1.108; 388-395, | Pkc_Phospho_Site 213-215, |
| | | | 1.103; 650-659, | 230-232, 258-260, |
| | | | 1.1; 483-490, | 259-261, 599-601, 622-624, |
| | | | 1.097; 852-858, | 676-678, 751-753, |
| | | | 1.097; 555-566, | 768-770, 843-845, 851-853; |
| | | | 1.097; 598-606, | Tyr_Phospho_Site |
| | | | 1.092; 729-737, | 57-65; |
| | | | 1.087; 783-790, | |
| | | | 1.082; 259-265, | |
| | | | 1.078; 673-681, | |
| | | | 1.075; 141-147, | |
| | | | 1.068; 743-750, | |
| | | | 1.067; 611-617, | |
| | | | 1.061; 26-39, | |
| | | | 1.047; 816-822, | |
| | | | 1.043 | |
| DEX0374_16.aa.30 | N | 0 -o | 375-384, 1.204; | Asn_Glycosylation |
| | | | 267-278, 1.183; | 225-228, 323-326, 341-344, |
| | | | 57-76, 1.183; 280-290, | 351-354, 357-360, |
| | | | 1.169; 126-134, | 366-369, 390-393; |
| | | | 1.168; 410-424, | Ck2_Phospho_Site 42-45, |
| | | | 1.166; 149-168, | 201-204, 205-208, |
| | | | 1.155; 88-107, | 217-220, 228-231, 230-233, |
| | | | 1.149; 110-121, | 241-244, 248-251, |
| | | | 1.142; 304-319, | 314-317, 325-328, 330-333; |
| | | | 1.127; 41-48, | Myristyl 342-347, |
| | | | 1.127; 231-239, | 358-363, 362-367; |
| | | | 1.123; 4-13, | Pkc_Phospho_Site 213-215, |
| | | | 1.122; 189-197, | 230-232, 258-260, |
| | | | 1.121; 244-254, | 259-261; |
| | | | 1.11; 388-395, | Tyr_Phospho_Site 57-65; |
| | | | 1.103; 259-265, | |
| | | | 1.078; 141-147, | |
| | | | 1.068; 26-39, | |
| | | | 1.047 | |
| DEX0374_16.aa.31 | N | 0 -o | 267-278, 1.183; | Asn_Glycosylation |
| | | | 57-76, 1.183; 280-290, | 225-228, 323-326, 341-344, |
| | | | 1.169; 126-134, | 351-354, 357-360, |
| | | | 1.168; 389-410, | 366-369; |
| | | | 1.166; 375-386, | Ck2_Phospho_Site 42-45, |
| | | | 1.156; 149-168 | 201-204, 205-208, |
| | | | 1.155; 88-107, | 217-220, 228-231, 230-233, |
| | | | 1.149; 110-121, | 241-244, 248-251, |
| | | | 1.142; 304-319, | 314-317, 325-328, 330-333; |
| | | | 1.127; 41-48 | Myristyl 342-347, |
| | | | 1.127; 231-239, | 358-363, 362-367; |
| | | | 1.123; 4-13, | Pkc_Phospho_Site 213-215, |
| | | | 1.122; 189-197, | 230-232, 258-260, |
| | | | 1.121; 244-254, | 259-261; |
| | | | 1.11; 259-265, | Tyr_Phospho_Site 57-65; |
| | | | 1.078; 141-147, | |
| | | | 1.068; 26-39, | |
| | | | 1.047 | |
| DEX0374_17.aa.3 | N | 0 -o | 70-86, 1.16; 8-27 | Asn_Glycosylation 58-61; |
| | | | 1.141; 111-122, | Camp_Phospho_Site |
| | | | 1.134; 43-49, | 40-43, 180-183; |
| | | | 1.133; 88-96, | Ck2_Phospho_Site 43-46; |
| | | | 1.126; 55-64, | Myristyl 56-61; |
| | | | 1.096; 151-160, | Pkc_Phospho_Site 116-118, |
| | | | 1.083; 133-139, | 145-147, 156-158, |
| | | | 1.078 | 163-165, 178-180, 183-185, |
| | | | | 194-196; |
| DEX0374_17.aa.4 | N | 0 -o | 13-28, 1.173; 251-263, | Asn_Glycosylation |
| | | | 1.161; 143-159, | 131-134; |
| | | | 1.16; 71-100, | Camp_Phospho_Site |
| | | | 1.141; 184-195, | 113-116; |
| | | | 1.134; 116-122, | Ck2_Phospho_Site 69-72, |
| | | | 1.133; 31-48, | 116-119, 251-254; |
| | | | 1.132; 50-57, | Myristyl 9-14, 57-62, |
| | | | 1.132; 224-244, | 66-71, 129-134; |
| | | | 1.13; 161-169, | Pkc_Phospho_Site 189-191, |
| | | | 1.126; 128-137, | 218-220, 229-231, |
| | | | 1.096; 206-212, | 246-248; |
| | | | 1.078 | |
| DEX0374_17.aa.5 | N | 0 -o | 201-241, 1.167; | Asn_Glycosylation 58-61; |
| | | | 178-196, 1.161; | Camp_Phospho_Site |
| | | | 70-86, 1.16; 8-27, | 40-43; |
| | | | 1.141; 111-122, | Ck2_Phospho_Site 43-46, |
| | | | 1.134; 43-49, | 178-181, 201-204, |
| | | | 1.133; 151-171, | 202-205, 247-250; |
| | | | 1.13; 88-96, | Myristyl 56-61, 236-241; |
| | | | 1.126; 55-64, | Pkc_Phospho_Site |
| | | | 1.096; 133-139, | 116-118, 145-147, 156-158, |
| | | | 1.078 | 173-175; |
| DEX0374_17.aa.6 | N | 1 -i65-87o | 64-85, 1.27; 47-62, | Ck2_Phospho_Site 16-19; |
| | | | 1.143; 20-30, | Pkc_Phospho_Site |
| | | | 1.073 | 21-23, 25-27; |
| | | | | Prokar_Lipoprotein |
| | | | | 79-89; |
| DEX0374_17.aa.7 | N | 0 -o | 151-165, 1.22; 70-86, | Asn_Glycosylation 58-61; |
| | | | 1.16; 8-27, | Camp_Phospho_Site |
| | | | 1.141; 111-122, | 40-43; |
| | | | 1.134; 43-49, | Ck2_Phospho_Site 43-46, |
| | | | 1.133; 88-96, | 165-168; Myristyl |
| | | | 1.126; 55-64, | 56-61; |
| | | | 1.096; 133-139 | Pkc_Phospho_Site 116-118 |
| | | | 1.078 | 145-147, 156-158; |
| DEX0374_17.aa.9 | N | 0 -o | 95-107, 1.161; 28-39, | Ck2_Phospho_Site 5-8, |
| | | | 1.134; 68-88, | 95-98; |
| | | | 1.13; 5-13, | Pkc_Phospho_Site 5-7, |
| | | | 1.118; 50-56, | 33-35, 62-64, 73-75, |
| | | | 1.078 | 90-92; |
| DEX0374_24.aa.2 | N | 0 -o | 179-199, 1.293; | Amidation 152-155; |
| | | | 333-362, 1.171; | Camp_Phospho_Site |
| | | | 255-273, 1.171; | 104-107; |
| | | | 217-230, 1.16; | Ck2_Phospho_Site 356-359; |
| | | | 278-286, 1.14; 24-40, | Glycosaminoglycan |
| | | | 1.122; 232-246, | 156-159; Myristyl 54-59, |
| | | | 1.104; 104-117, | 58-63, 64-69, 78-83, |
| | | | 1.102; 93-99, | 79-84, 161-166, |
| | | | 1.093; 304-314, | 165-170, 215-220, 347-352; |
| | | | 1.092; 140-146, | Pkc_Phospho_Site |
| | | | 1.09; 291-297, | 14-16, 75-77, 93-95, |
| | | | 1.078; 316-324, | 129-131, 156-158, 212-214, |
| | | | 1.063; 129-135, | 321-323; |
| | | | 1.043 | Prokar_Lipoprotein |
| | | | | 222-232; |
| DEX0374_24.aa.3 | Y | 0 -o | 4-23, 1.293; 157-187, | Amidation 231-234, |
| | | | 1.171; 79-97, | 270-273, 332-335; |
| | | | 1.171; 41-54, | Asn_Glycosylation |
| | | | 1.16; 102-110, | 310-313; |
| | | | 1.14; 243-249, | Camp_Phospho_Site |
| | | | 1.136; 56-70, | 234-237; |
| | | | 1.104; 128-138, | Ck2_Phospho_Site 180-183, |
| | | | 1.092; 115-121, | 282-285, 294-297, |
| | | | 1.078; 140-148, | 320-323, 328-331; |
| | | | 1.063; 280-286, | Myristyl 39-44, 171-176, |
| | | | 1.021 | 196-201, 202-207, |
| | | | | 265-270, 304-309; |
| | | | | Pkc_Phospho_Site 36-38, |
| | | | | 145-147, 279-281, |
| | | | | 284-286, 312-314, 319-321, |
| | | | | 320-322; |
| | | | | Prokar_Lipoprotein |
| | | | | 46-56; |
| DEX0374_27.aa.2 | N | 0 -o | 4-25, 1.182; 27-38, | Pkc_Phospho_Site 13-15, |
| | | | 1.133; 43-51, | 28-30; |
| | | | 1.132 | |
| DEX0374_35.aa.2 | N | 0 -o | 15-57, 1.21; 64-72, | Glycosaminoglycan 75-78; |
| | | | 1.14; 118-138, | Myristyl 107-112; |
| | | | 1.081; 108-114, | Pkc_Phospho_Site 119-121; |
| | | | 1.08; 81-90, | |
| | | | 1.055 | |
| DEX0374_39.aa.3 | N | 0 -o | 28-40, 1.189; 4-21, | Ck2_Phospho_Site 26-29; |
| | | | 1.098 | Pkc_Phospho_Site |
| | | | | 14-16, 19-21; |
| DEX0374_43.aa.3 | N | 0 -o | 26-72, 1.133; 85-107, | Ck2_Phospho_Site 118-121; |
| | | | 1.112 | Myristyl 9-14, |
| | | | | 72-77; |
| | | | | Pkc_Phospho_Site 40-42, |
| | | | | 44-46, 111-113; |
| DEX0374_45.aa.2 | y | 0 -i | 101-129, 1.21; 37-60, | Ck2_Phospho_Site 22-25, |
| | | | 1.166; 91-99, | 84-87; |
| | | | 1.111; 131-138, | Prokar_Lipoprotein |
| | | | 1.098; 10-21, | 50-60; |
| | | | 1.085; 71-77, | |
| | | | 1.083 | |
| DEX0374_53.aa.3 | N | 0 -o | 611-626, 1.248; | Amidation 195-198, |
| | | | 446-459, 1.214; | 227-230, 304-307, 402-405; |
| | | | 952-962, 1.204; | Asn_Glycosylation |
| | | | 247-266, 1.193; | 769-772; |
| | | | 639-649, 1.16; | Camp_Phospho_Site |
| | | | 123-133, 1.146; | 306-309, 372-375, 528-531; |
| | | | 666-685, 1.141; | Ck2_Phospho_Site |
| | | | 748-760, 1.139; | 31-34, 135-138, 236-239, |
| | | | 387-395, 1.131; | 321-324, 328-331, |
| | | | 303-310, 1.129; | 363-366, 375-378, 383-386, |
| | | | 180-187, 1.128; | 464-467, 477-480, |
| | | | 711-736, 1.126; | 505-508, 573-576, 650-653, |
| | | | 474-483, 1.124; | 739-742, 765-768, |
| | | | 862-873, 1.124; | 796-799, 893-896, 894-897, |
| | | | 408-423, 1.123; | 895-898, 899-902; |
| | | | 832-847, 1.117; | Glycosaminoglycan |
| | | | 236-242, 1.112; | 221-224; Myristyl |
| | | | 57-69, 1.108; 509-517, | 129-134, 142-147, 279-284, |
| | | | 1.105; 776-788, | 356-361, 440-445, |
| | | | 1.102; 158-165, | 549-554, 632-637, 890-895, |
| | | | 1.101; 223-230, | 907-912, 946-951, |
| | | | 1.095; 807-819, | 947-952, 949-954; |
| | | | 1.091; 593-606, | Pkc_Phospho_Site 70-72, |
| | | | 1.091; 191-199, | 80-82, 84-86, 135-137, |
| | | | 1.088; 291-297, | 172-174, 195-197, |
| | | | 1.083; 269-276, | 221-223, 301-303, 316-318, |
| | | | 1.079; 13-34, | 328-330, 345-347, |
| | | | 1.075; 141-153, | 371-373, 400-402, 468-470, |
| | | | 1.069; 522-530, | 521-523, 541-543, |
| | | | 1.068; 82-88, | 714-716, 729-731, 744-746, |
| | | | 1.064; 336-347, | 851-853; Rgd |
| | | | 1.061; 548-554, | 183-185, 954-956; |
| | | | 1.061; 106-118, | |
| | | | 1.06; 91-99, | |
| | | | 1.056; 821-827, | |
| | | | 1.046; 431-439, | |
| | | | 1.037; 168-174, | |
| | | | 1.033; 561-567, | |
| | | | 1.032 | |
| DEX0374_53.aa.4 | N | 0 -o | 66-81, 1.248; 94-104, | Ck2_Phospho_Site 17-20, |
| | | | 1.16; 166-199, | 105-108, 202-205; |
| | | | 1.143; 15-38, | Myristyl 34-39, 87-92; |
| | | | 1.142; 121-140, | Pkc_Phospho_Site |
| | | | 1.141; 48-61, | 45-47, 169-171, 184-186; |
| | | | 1.091 | |
| DEX0374_53.aa.6 | N | 0 -o | 89-100, 1.204; 4-11, | Ck2_Phospho_Site 30-33, |
| | | | 1.124 | 31-34, 32-35, 36-39; |
| | | | | Myristyl 27-32, |
| | | | | 44-49, 83-88, 84-89, |
| | | | | 86-91; Rgd 91-93; |
| DEX0374_53.aa.7 | N | 0 -o | 611-626, 1.248; | Amidation 195-198, |
| | | | 446-459, 1.214; | 227-230, 304-307, 402-405; |
| | | | 944-954, 1.204; | Asn_Glycosylation |
| | | | 247-266, 1.193; | 769-772; |
| | | | 639-649, 1.16; | Camp_Phospho_Site |
| | | | 123-133, 1.146; | 306-309, 372-375, 528-531; |
| | | | 666-685, 1.141; | Ck2_Phospho_Site |
| | | | 748-760, 1.139; | 31-34, 135-138, 236-239, |
| | | | 387-395, 1.131; | 321-324, 328-331, |
| | | | 303-310, 1.129; | 363-366, 375-378, 383-386, |
| | | | 180-187, 1.128; | 464-467, 477-480, |
| | | | 711-736, 1.126; | 505-508, 573-576, 650-653, |
| | | | 474-483, 1.124; | 739-742, 765-768, |
| | | | 854-865, 1.124; | 796-799, 885-888, 886-889, |
| | | | 408-423, 1.123; | 887-890, 891-894; |
| | | | 236-242, 1.112; | Glycosaminoglycan |
| | | | 57-69, 1.108; 509-517, | 221-224; Myristyl |
| | | | 1.105; 776-788, | 129-134, 142-147, 279-284, |
| | | | 1.102; 158-165, | 356-361, 440-445, |
| | | | 1.101; 223-230, | 549-554, 632-637, 835-840, |
| | | | 1.095; 807-819, | 882-887, 899-904, |
| | | | 1.091; 593-606, | 938-943, 939-944, 941-946; |
| | | | 1.091; 191-199, | Pkc_Phospho_Site |
| | | | 1.088; 291-297, | 70-72, 80-82, 84-86, |
| | | | 1.083; 269-276, | 135-137, 172-174, 195-197, |
| | | | 1.079; 13-34, | 221-223, 301-303, |
| | | | 1.075; 141-153, | 316-318, 328-330, 345-347, |
| | | | 1.069; 522-530, | 371-373, 400-402, |
| | | | 1.068; 82-88, | 468-470, 521-523, 541-543, |
| | | | 1.064; 336-347, | 714-716, 729-731, |
| | | | 1.061; 548-554, | 744-746, 843-845; Rgd |
| | | | 1.061; 106-118, | 183-185, 946-948; |
| | | | 1.06; 91-99, | |
| | | | 1.056; 821-827, | |
| | | | 1.046; 431-439, | |
| | | | 1.037; 168-174, | |
| | | | 1.033; 561-567, | |
| | | | 1.032 | |
| DEX0374_53.aa.8 | N | 0 -o | 611-626, 1.248; | Amidation 195-198, |
| | | | 446-459, 1.214; | 227-230, 304-307, 402-405; |
| | | | 247-266, 1.193; | Asn_Glycosylation |
| | | | 639-649, 1.16; | 769-772; |
| | | | 123-133, 1.146; | Camp_Phospho_Site |
| | | | 666-685, 1.141; | 306-309, 372-375, 528-531; |
| | | | 748-760, 1.139; | Ck2_Phospho_Site |
| | | | 387-395, 1.131; | 31-34, 135-138, 236-239, |
| | | | 303-310, 1.129; | 321-324, 328-331, |
| | | | 180-187, 1.128; | 363-366, 375-378, 383-386, |
| | | | 711-736, 1.126; | 464-467, 477-480, |
| | | | 474-483, 1.124; | 505-508, 573-576, 650-653, |
| | | | 408-423, 1.123; | 739-742, 765-768, |
| | | | 236-242, 1.112; | 796-799; |
| | | | 57-69, 1.108; 509-517, | Glycosaminoglycan |
| | | | 1.105; 776-788, | 221-224; Myristyl |
| | | | 1.102; 158-165, | 129-134, 142-147, 279-284, |
| | | | 1.101; 223-230, | 356-361, 440-445, |
| | | | 1.095; 807-819, | 549-554, 632-637; |
| | | | 1.091; 593-606, | Pkc_Phospho_Site 70-72, |
| | | | 1.091; 191-199, | 80-82, 84-86, 135-137, |
| | | | 1.088; 291-297, | 172-174, 195-197, |
| | | | 1.083; 269-276, | 221-223, 301-303, 316-318, |
| | | | 1.079; 13-34, | 328-330, 345-347, |
| | | | 1.075; 141-153 | 371-373, 400-402, 468-470 |
| | | | 1.069; 522-530, | 521-523, 541-543, |
| | | | 1.068; 82-88, | 714-716, 729-731, 744-746; |
| | | | 1.064; 336-347, | Rgd 183-185; |
| | | | 1.061; 548-554, | |
| | | | 1.061; 106-118, | |
| | | | 1.06; 91-99, | |
| | | | 1.056; 821-827, | |
| | | | 1.046; 431-439, | |
| | | | 1.037; 168-174, | |
| | | | 1.033; 561-567, | |
| | | | 1.032 | |
| DEX0374_53.aa.10 | N | 0 -o | 123-138, 1.248; | Asn_Glycosylation |
| | | | 456-466, 1.204; | 281-284; |
| | | | 151-161, 1.16; | Camp_Phospho_Site 40-43; |
| | | | 178-197, 1.141; | Ck2_Phospho_Site |
| | | | 260-272, 1.139; | 17-20, 85-88, 162-165, |
| | | | 223-248, 1.126; | 251-254, 277-280, 308-311, |
| | | | 366-377, 1.124; | 397-400, 398-401, |
| | | | 21-29, 1.105; 288-300, | 399-402, 403-406; |
| | | | 1.102; 319-331, | Myristyl 61-66, 144-149, |
| | | | 1.091; 105-118, | 347-352, 394-399, |
| | | | 1.091; 34-42, | 411-416, 450-455, 451-456, |
| | | | 1.068; 60-66, | 453-458; |
| | | | 1.061; 333-339, | Pkc_Phospho_Site 33-35, |
| | | | 1.046; 73-79, | 53-55, 226-228, |
| | | | 1.032 | 241-243, 256-258, 355-357; |
| | | | | Rgd 458-460; |
| DEX0374_53.aa.11 | N | 0 -o | 238-248, 1.204; | Asn_Glycosylation 63-66; |
| | | | 42-54, 1.139; 5-30, | Ck2_Phospho_Site |
| | | | 1.126; 148-159, | 33-36, 59-62, 90-93, |
| | | | 1.124; 70-82, | 179-182, 180-183, 181-184, |
| | | | 1.102; 101-113, | 185-188; Myristyl |
| | | | 1.091; 127-133, | 129-134, 176-181, 193-198, |
| | | | 1.053; 115-121, | 232-237, 233-238, |
| | | | 1.046 | 235-240; |
| | | | | Pkc_Phospho_Site 5-7, |
| | | | | 23-25, 38-40, 137-139; |
| | | | | Rgd 240-242; |
| DEX0374_53.aa.12 | N | 0 -o | 611-626, 1.248; | Amidation 195-198, |
| | | | 446-459, 1.214; | 227-230, 304-307, 402-405; |
| | | | 247-266, 1.193; | Camp_Phospho_Site |
| | | | 639-649, 1.16; | 306-309, 372-375, 528-531; |
| | | | 123-133, 1.146; | Ck2_Phospho_Site |
| | | | 666-685, 1.141; | 31-34, 135-138, 236-239, |
| | | | 387-395, 1.131; | 321-324, 328-331, |
| | | | 303-310, 1.129; | 363-366, 375-378, 383-386, |
| | | | 180-187, 1.128; | 464-467, 477-480, |
| | | | 474-483, 1.124; | 505-508, 573-576, 650-653; |
| | | | 408-423, 1.123; | Glycosaminoglycan |
| | | | 236-242, 1.112; | 221-224; Myristyl |
| | | | 57-69, 1.108; 509-517, | 129-134, 142-147, 279-284, |
| | | | 1.105; 158-165, | 356-361, 440-445, |
| | | | 1.101; 223-230, | 549-554, 632-637; |
| | | | 1.095; 593-606, | Pkc_Phospho_Site 70-72, |
| | | | 1.091; 191-199, | 80-82, 84-86, 135-137, |
| | | | 1.088; 291-297, | 172-174, 195-197, |
| | | | 1.083; 269-276, | 221-223, 301-303, 316-318, |
| | | | 1.079; 13-34, | 328-330, 345-347, |
| | | | 1.075; 141-153, | 371-373, 400-402, 468-470, |
| | | | 1.069; 522-530, | 521-523, 541-543; |
| | | | 1.068; 82-88, | Rgd 183-185; |
| | | | 1.064; 336-347, | |
| | | | 1.061; 548-554, | |
| | | | 1.061; 106-118, | |
| | | | 1.06; 91-99, | |
| | | | 1.056; 431-439, | |
| | | | 1.037; 168-174, | |
| | | | 1.033; 561-567, | |
| | | | 1.032 | |
| DEX0374_53.aa.13 | N | 0 -o | 611-626, 1.248; | Amidation 195-198, |
| | | | 683-694, 1.243; | 227-230, 304-307, 402-405; |
| | | | 446-459, 1.214; | Camp_Phospho_Site |
| | | | 247-266, 1.193; | 306-309, 372-375, 528-531; |
| | | | 639-649, 1.16; | Ck2_Phospho_Site |
| | | | 123-133, 1.146; | 31-34, 135-138, 236-239, |
| | | | 674-681, 1.132; | 321-324, 328-331, |
| | | | 387-395, 1.131; | 363-366, 375-378, 383-386, |
| | | | 303-310, 1.129; | 464-467, 477-480, |
| | | | 180-187, 1.128; | 505-508, 573-576, 650-653; |
| | | | 474-483, 1.124; | Glycosaminoglycan |
| | | | 408-423, 1.123; | 221-224; Myristyl |
| | | | 236-242, 1.112; | 129-134, 142-147, 279-284, |
| | | | 57-69, 1.108; 509-517, | 356-361, 440-445, |
| | | | 1.105; 158-165, | 549-554, 632-637, 673-678, |
| | | | 1.101; 223-230, | 678-683, 685-690, |
| | | | 1.095; 593-606, | 693-698; |
| | | | 1.091; 191-199, | Pkc_Phospho_Site 70-72, |
| | | | 1.088; 291-297, | 80-82, 84-86, 135-137, |
| | | | 1.083; 269-276, | 172-174, 195-197, |
| | | | 1.079; 13-34, | 221-223, 301-303, 316-318, |
| | | | 1.075; 141-153, | 328-330, 345-347, |
| | | | 1.069; 522-530, | 371-373, 400-402, 468-470, |
| | | | 1.068; 82-88, | 521-523, 541-543; |
| | | | 1.064; 336-347, | Rgd 183-185; |
| | | | 1.061; 548-554, | |
| | | | 1.061; 106-118, | |
| | | | 1.06; 91-99, | |
| | | | 1.056; 431-439, | |
| | | | 1.037; 168-174, | |
| | | | 1.033; 561-567, | |
| | | | 1.032 | |
| DEX0374_53.aa.14 | N | 0 -o | 238-248, 1.204; | Asn_Glycosylation 63-66; |
| | | | 42-54, 1.139; 5-30, | Ck2_Phospho_Site |
| | | | 1.126; 148-159, | 33-36, 59-62, 90-93, |
| | | | 1.124; 70-82, | 179-182, 180-183, 181-184, |
| | | | 1.102; 101-113, | 185-188; Myristyl |
| | | | 1.091; 127-133, | 129-134, 176-181, 193-198, |
| | | | 1.053; 115-121, | 232-237, 233-238, |
| | | | 1.046 | 235-240; |
| | | | | Pkc_Phospho_Site 5-7, |
| | | | | 23-25, 38-40, 137-139; |
| | | | | Rgd 240-242; |
| DEX0374_53.aa.15 | N | 0 -o | 446-459, 1.214; | Amidation 195-198, |
| | | | 247-266, 1.193; | 227-230, 304-307, 402-405; |
| | | | 123-133, 1.146; | Camp_Phospho_Site |
| | | | 387-395, 1.131; | 306-309, 372-375; |
| | | | 303-310, 1.129; | Ck2_Phospho_Site 31-34, |
| | | | 180-187, 1.128; | 135-138, 236-239, |
| | | | 474-483, 1.124; | 321-324, 328-331, 363-366, |
| | | | 408-423, 1.123; | 375-378, 383-386, |
| | | | 236-242, 1.112; | 464-467, 477-480, 505-508; |
| | | | 57-69, 1.108; 548-556, | Glycosaminoglycan |
| | | | 1.104; 158-165, | 221-224; Myristyl |
| | | | 1.101; 533-541, | 129-134, 142-147, 279-284, |
| | | | 1.096; 223-230, | 356-361, 440-445, |
| | | | 1.095; 191-199, | 523-528, 547-552; |
| | | | 1.088; 291-297, | Pkc_Phospho_Site 70-72, |
| | | | 1.083; 517-524, | 80-82, 84-86, 135-137, |
| | | | 1.083; 269-276, | 172-174, 195-197, |
| | | | 1.079; 13-34, | 221-223, 301-303, 316-318, |
| | | | 1.075; 141-153, | 328-330, 345-347, |
| | | | 1.069; 82-88, | 371-373, 400-402, 468-470, |
| | | | 1.064; 336-347, | 527-529; Rgd |
| | | | 1.061; 106-118, | 183-185; |
| | | | 1.06; 91-99, | |
| | | | 1.056; 431-439, | |
| | | | 1.037; 168-174, | |
| | | | 1.033 | |
| DEX0374_53.aa.16 | N | 0 -o | 246-256, 1.204; | Asn_Glycosylation 63-66; |
| | | | 42-54, 1.139; 5-30, | Ck2_Phospho_Site |
| | | | 1.126; 156-167, | 33-36, 59-62, 90-93, |
| | | | 1.124; 70-82, | 187-190, 188-191, 189-192, |
| | | | 1.102; 101-113, | 193-196; Myristyl |
| | | | 1.091; 125-132, | 184-189, 201-206, 240-245, |
| | | | 1.057; 135-141, | 241-246, 243-248; |
| | | | 1.053; 115-121, | Pkc_Phospho_Site 5-7, |
| | | | 1.046 | 23-25, 38-40, 145-147; |
| | | | | Rgd 248-250; |
| DEX0374_53.aa.17 | N | 0 -o | 21-29, 1.105; 104-118, | Camp_Phospho_Site 40-43; |
| | | | 1.091; 34-42, | Ck2_Phospho_Site |
| | | | 1.068; 60-66, | 17-20, 85-88; Myristyl |
| | | | 1.061; 73-79, | 61-66; |
| | | | 1.032 | Pkc_Phospho_Site 33-35, |
| | | | | 53-55; |
| DEX0374_53 | N | 0 -o | 66-81, 1.248; 94-104, | Ck2_Phospho_Site 17-20, |
| | | | 1.16; 189-222, | 105-108, 125-128, |
| | | | 1.143; 15-38, | 153-156; Myristyl 34-39, |
| | | | 1.142; 141-149, | 87-92; |
| | | | 1.136; 152-168 | Pkc_Phospho_Site 45-47, |
| | | | 1.136; 122-139, | 127-129, 146-148, |
| | | | 1.11; 48-61, | 207-209; |
| | | | 1.091 | |
| DEX0374_53.aa.19 | N | 0 -o | 570-585, 1.248; | Amidation 195-198, |
| | | | 903-913, 1.204; | 227-230, 304-307, 402-405; |
| | | | 247-266, 1.193; | Asn_Glycosylation |
| | | | 598-608, 1.16; | 728-731; |
| | | | 123-133, 1.146; | Camp_Phospho_Site |
| | | | 625-644, 1.141; | 306-309, 372-375, 487-490; |
| | | | 707-719, 1.139; | Ck2_Phospho_Site |
| | | | 387-395, 1.131; | 31-34, 135-138, 236-239, |
| | | | 303-310, 1.129; | 321-324, 328-331, |
| | | | 180-187, 1.128; | 363-366, 375-378, 383-386, |
| | | | 670-695, 1.126; | 464-467, 532-535, |
| | | | 813-824, 1.124; | 609-612, 698-701, 724-727, |
| | | | 408-423, 1.123; | 755-758, 844-847, |
| | | | 236-242, 1.112; | 845-848, 846-849, 850-853; |
| | | | 57-69, 1.108; 468-476, | GlycosaminoglyCan |
| | | | 1.105; 735-747, | 221-224; Myristyl |
| | | | 1.102; 158-165, | 129-134, 142-147, 279-284, |
| | | | 1.101; 223-230, | 356-361, 508-513, |
| | | | 1.095; 766-778, | 591-596, 794-799, 841-846, |
| | | | 1.091; 552-565, | 858-863, 897-902, |
| | | | 1.091; 191-199, | 898-903, 900-905; |
| | | | 1.088; 291-297, | Pkc_Phospho_Site 70-72, |
| | | | 1.083; 269-276, | 80-82, 84-86, 135-137, |
| | | | 1.079; 13-34, | 172-174, 195-197, |
| | | | 1.075; 141-153, | 221-223, 301-303, 316-318, |
| | | | 1.069; 481-489, | 328-330, 345-347, |
| | | | 1.068; 82-88, | 371-373, 400-402, 480-482, |
| | | | 1.064; 336-347, | 500-502, 673-675, |
| | | | 1.061; 507-513, | 688-690, 703-705, 802-804; |
| | | | 1.061; 106-118, | Rgd 183-185, |
| | | | 1.06; 91-99, | 905-907; |
| | | | 1.056; 780-786, | |
| | | | 1.046; 431-439, | |
| | | | 1.037; 168-174, | |
| | | | 1.033; 520-526, | |
| | | | 1.032 | |
| DEX0374_53.aa.20 | N | 0 -o | 611-626, 1.248; | Amidation 195-198, |
| | | | 446-459, 1.214; | 227-230, 304-307, 402-405; |
| | | | 247-266, 1.193; | Asn_Glycosylation |
| | | | 639-649, 1.16; | 769-772; |
| | | | 123-133, 1.146; | Camp_Phospho_Site |
| | | | 666-685, 1.141; | 306-309, 372-375, 528-531; |
| | | | 748-760, 1.139; | Ck2_Phospho_Site |
| | | | 387-395, 1.131; | 31-34, 135-138, 236-239, |
| | | | 303-310, 1.129; | 321-324, 328-331, |
| | | | 180-187, 1.128; | 363-366, 375-378, 383-386, |
| | | | 711-736, 1.126; | 464-467, 477-480, |
| | | | 474-483, 1.124; | 505-508, 573-576, 650-653, |
| | | | 408-423, 1.123; | 739-742, 765-768, |
| | | | 236-242, 1.112; | 796-799; |
| | | | 57-69, 1.108; 509-517, | Glycosaminoglycan |
| | | | 1.105; 776-788, | 221-224; Myristyl |
| | | | 1.102; 158-165, | 129-134, 142-147, 279-284, |
| | | | 1.101; 223-230, | 356-361, 440-445, |
| | | | 1.095; 807-819, | 549-554, 632-637, 835-840; |
| | | | 1.091; 593-606, | Pkc_Phospho_Site |
| | | | 1.091; 191-199, | 70-72, 80-82, 84-86, |
| | | | 1.088; 291-297, | 135-137, 172-174, 195-197, |
| | | | 1.083; 269-276, | 221-223, 301-303, |
| | | | 1.079; 13-34, | 316-318, 328-330, 345-347, |
| | | | 1.075; 141-153, | 371-373, 400-402, |
| | | | 1.069; 522-530, | 468-470, 521-523, 541-543, |
| | | | 1.068; 82-88, | 714-716, 729-731, |
| | | | 1.064; 336-347, | 744-746, 843-845; Rgd |
| | | | 1.061; 548-554, | 183-185; |
| | | | 1.061; 106-118, | |
| | | | 1.06; 91-99, | |
| | | | 1.056; 834-842, | |
| | | | 1.053; 821-827, | |
| | | | 1.046; 431-439, | |
| | | | 1.037; 168-174, | |
| | | | 1.033; 561-567, | |
| | | | 1.032 | |
| DEX0374_53.aa.21 | N | 0 -o | 611-626, 1.248; | Amidation 195-198, |
| | | | 446-459, 1.214; | 227-230, 304-307, 402-405, |
| | | | 247-266, 1.193; | 845-848, 877-880; |
| | | | 800-814, 1.187; | Asn_Glycosylation |
| | | | 639-649, 1.16; | 769-772; |
| | | | 123-133, 1.146; | Camp_Phospho_Site |
| | | | 666-685, 1.141; | 306-309, 372-375, 528-531, |
| | | | 748-760, 1.139; | 861-864, 862-865; |
| | | | 387-395, 1.131; | Ck2_Phospho_Site 31-34, |
| | | | 303-310, 1.129; | 135-138, 236-239, |
| | | | 180-187, 1.128; | 321-324, 328-331, 363-366, |
| | | | 711-736, 1.126; | 375-378, 383-386, |
| | | | 474-483, 1.124; | 464-467, 477-480, 505-508, |
| | | | 408-423, 1.123; | 573-576, 650-653, |
| | | | 236-242, 1.112; | 739-742, 765-768, 796-799; |
| | | | 57-69, 1.108; 907-922, | Glycosaminoglycan |
| | | | 1.107; 509-517, | 221-224; Myristyl |
| | | | 1.105; 776-788, | 129-134, 142-147, 279-284, |
| | | | 1.102; 158-165, | 356-361, 440-445, |
| | | | 1.101; 223-230, | 549-554, 632-637, 845-850, |
| | | | 1.095; 593-606, | 849-854, 874-879, |
| | | | 1.091; 191-199, | 902-907; |
| | | | 1.088; 291-297, | Pkc_Phospho_Site 70-72, |
| | | | 1.083; 269-276, | 80-82, 84-86, 135-137, |
| | | | 1.079; 13-34, | 172-174, 195-197, |
| | | | 1.075; 141-153, | 221-223, 301-303, 316-318, |
| | | | 1.069; 522-530, | 328-330, 345-347, |
| | | | 1.068; 82-88, | 371-373, 400-402, 468-470, |
| | | | 1.064; 885-893, | 521-523, 541-543, |
| | | | 1.063; 336-347, | 714-716, 729-731, 744-746, |
| | | | 1.061; 548-554, | 813-815, 834-836, |
| | | | 1.061; 106-118, | 841-843, 857-859, 860-862, |
| | | | 1.06; 91-99, | 877-879; Rgd |
| | | | 1.056; 431-439, | 183-185; |
| | | | 1.037; 168-174, | |
| | | | 1.033; 561-567, | |
| | | | 1.032 | |
| DEX0374_53.aa.22 | N | 0 -o | 611-626, 1.248; | Amidation 195-198, |
| | | | 446-459, 1.214; | 227-230, 304-307, 402-405; |
| | | | 997-1007, 1.204; | Asn_Glycosylation |
| | | | 247-266, 1.193; | 822-825; |
| | | | 687-705, 1.188; | Camp_Phospho_Site |
| | | | 639-649, 1.16; | 306-309, 372-375, 528-531; |
| | | | 730-744, 1.153; | Ck2_Phospho_Site |
| | | | 123-133, 1.146; | 31-34, 135-138, 236-239, |
| | | | 666-685, 1.141; | 321-324, 328-331, |
| | | | 801-813, 1.139; | 363-366, 375-378, 383-386, |
| | | | 387-395, 1.131; | 464-467, 477-480, |
| | | | 303-310, 1.129; | 505-508, 573-576, 650-653, |
| | | | 180-187, 1.128; | 792-795, 818-821, |
| | | | 764-789, 1.126; | 849-852, 938-941, 939-942, |
| | | | 474-483, 1.124; | 940-943, 944-947; |
| | | | 907-918, 1.124; | Glycosaminoglycan |
| | | | 408-423, 1.123; | 221-224; Myristyl |
| | | | 236-242, 1.112; | 129-134, 142-147, 279-284, |
| | | | 709-719, 1.11; 57-69, | 356-361, 440-445, |
| | | | 1.108; 509-517, | 549-554, 632-637, 718-723, |
| | | | 1.105; 829-841, | 888-893, 935-940, |
| | | | 1.102; 158-165, | 952-957, 991-996, 992-997, |
| | | | 1.101; 223-230, | 994-999; |
| | | | 1.095; 860-872, | Pkc_Phospho_Site 70-72, |
| | | | 1.091; 593-606, | 80-82, 84-86, 135-137, |
| | | | 1.091; 191-199, | 172-174, 195-197, |
| | | | 1.088; 291-297, | 221-223, 301-303, 316-318, |
| | | | 1.083; 269-276, | 328-330, 345-347, |
| | | | 1.079; 13-34, | 371-373, 400-402, 468-470, |
| | | | 1.075; 141-153, | 521-523, 541-543, |
| | | | 1.069; 522-530, | 767-769, 782-784, 797-799, |
| | | | 1.068; 82-88, | 896-898; Rgd |
| | | | 1.064; 336-347, | 183-185, 999-1001; |
| | | | 1.061; 548-554, | Prokar_Lipoprotein |
| | | | 1.061; 106-118, | 711-721; |
| | | | 1.06; 91-99, | |
| | | | 1.056; 874-880, | |
| | | | 1.046; 431-439, | |
| | | | 1.037; 168-174, | |
| | | | 1.033; 561-567, | |
| | | | 1.032 | |
| DEX0374_53.aa.23 | N | 0 -o | 310-320, 1.204; 4-18, | Asn_Glycosylation |
| | | | 1.157; 43-57, | 135-138; |
| | | | 1.153; 114-126, | Ck2_Phospho_Site 105-108, |
| | | | 1.139; 77-102, | 131-134, 162-165, |
| | | | 1.126; 220-231, | 251-254, 252-255, 253-256, |
| | | | 1.124; 22-32, | 257-260; Myristyl |
| | | | 1.11; 142-154, | 31-36, 201-206, 248-253, |
| | | | 1.102; 173-185, | 265-270, 304-309, |
| | | | 1.091; 187-193, | 305-310, 307-312; |
| | | | 1.046 | Pkc_Phospho_Site 80-82, |
| | | | | 95-97, 110-112, |
| | | | | 209-211; Rgd 312-314; |
| | | | | Prokar_Lipoprotein |
| | | | | 24-34; |
| DEX0374_53.aa.25 | N | 0 -o | 63-74, 1.124; 208-220 | Amidation 172-175; |
| | | | 1.111; 160-166, | Camp_Phospho_Site |
| | | | 1.11; 115-126, | 210-213; |
| | | | 1.109; 254-266, | Ck2_Phospho_Site 94-97 |
| | | | 1.091; 145-155, | 95-98, 96-99, 100-103, |
| | | | 1.087; 128-136, | 161-164, 190-193, |
| | | | 1.083; 39-50, | 194-197, 257-260; |
| | | | 1.074; 6-12, | Myristyl 13-18, 91-96, |
| | | | 1.062; 245-252, | 108-113, 198-203, |
| | | | 1.02 | 201-206, 205-210, 239-244, |
| | | | | 252-257; |
| | | | | Pkc_Phospho_Site 26-28, |
| | | | | 172-174, 209-211, |
| | | | | 261-263; |
| DEX0374_53.aa.26 | y | 0 -o | 5-17, 1.221; 25-46, | Amidation 228-231; |
| | | | 1.165; 119-130, | Camp_Phospho_Site |
| | | | 1.124; 265-276, | 266-269; |
| | | | 1.111; 216-222, | Ck2_Phospho_Site 53-56, |
| | | | 1.11; 172-182, | 150-153, 151-154, |
| | | | 1.109; 88-95, | 152-155, 156-159, 217-220, |
| | | | 1.093; 64-77, | 246-249, 250-253, |
| | | | 1.091; 310-322, | 313-316; Myristyl |
| | | | 1.091; 202-211, | 147-152, 164-169, 254-259, |
| | | | 1.087; 186-192, | 257-262, 261-266, |
| | | | 1.083; 98-104, | 295-300, 308-313; |
| | | | 1.053 | Pkc_Phospho_Site 108-110, |
| | | | | 228-230, 265-267, |
| | | | | 317-319; |
| DEX0374_56.aa.3 | N | 0 -o | 33-79, 1.271; 4-21, | Asn_Glycosylation |
| | | | 1.165; 97-106, | 115-118; |
| | | | 1.14 | Ck2_Phospho_Site 24-27, |
| | | | | 48-51, 116-119; |
| | | | | Myristyl 33-38, 93-98, |
| | | | | 100-105; |
| | | | | Pkc_Phospho_Site 29-31, |
| | | | | 34-36, 76-78; |
| DEX0374_56.aa.4 | N | 0 -o | 105-115, 1.217; | Zinc_Finger_C2h2 114-134, |
| | | | 501-510, 1.204; | 142-162, 169-190, |
| | | | 161-171, 1.187; | 170-190, 198-218, 288-308, |
| | | | 336-345, 1.175; | 316-336, 344-364, |
| | | | 133-143, 1.158; | 373-393, 453-473, 481-501, |
| | | | 349-374, 1.156; | 509-529; |
| | | | 473-480, 1.147; | Amidation 117-120, |
| | | | 308-315, 1.147; | 319-322, 484-487; |
| | | | 188-212, 1.125; | Asn_Glycosylation 13-16, |
| | | | 376-398, 1.125; | 328-331, 335-338, |
| | | | 513-533, 1.115; | 493-496, 500-503; |
| | | | 24-39, 1.115; 252-258, | Camp_Phospho_Site |
| | | | 1.108; 12-18 | 119-122, 175-178, 321-324, |
| | | | 1.102; 280-286, | 486-489; |
| | | | 1.101; 445-451, | Ck2_Phospho_Site 83-86, |
| | | | 1.101; 174-183, | 106-109, 197-200, |
| | | | 1.096; 93-101, | 275-278, 536-539; |
| | | | 1.095; 234-242, | Glycosaminoglycan |
| | | | 1.079; 222-231, | 107-110; Myristyl 7-12, |
| | | | 1.078; 406-415, | 12-17, 14-19, 70-75, |
| | | | 1.076; 458-467, | 224-229, 259-264, |
| | | | 1.072; 119-127, | 266-271, 269-274, 429-434; |
| | | | 1.068; 265-272, | Pkc_Phospho_Site |
| | | | 1.055; 296-302, | 76-78, 126-128, 150-152, |
| | | | 1.046; 45-54, | 178-180, 324-326, |
| | | | 1.035 | 379-381, 424-426, 489-491, |
| | | | | 517-519, 536-538; |
| DEX0374_56.aa.9 | N | 1 — | 46-65, 1.197; 24-39, | Asn_Glycosylation 13-16; |
| | | o44-63i | 39, 1.115; 12-18, | Myristyl 7-12, |
| | | | 1.102 | 12-17, 14-19; |
| | | | | Pkc_Phospho_Site 62-64; |
| | | | | Prokar_Lipoprotein |
| | | | | 50-60; |
| DEX0374_56.aa.12 | N | 0 -o | 514-523, 1.204; | Zinc_Finger_C2h2 155-175, |
| | | | 174-184, 1.187; | 182-203, 183-203, |
| | | | 113-123, 1.182; | 211-231, 301-321, 329-349, |
| | | | 349-358, 1.175; | 357-377, 386-406, |
| | | | 35-62, 1.166; 146-156, | 466-486, 494-514, 522-542; |
| | | | 1.158; 362-387, | Atp_Gtp_A 87-94; |
| | | | 1.156; 486-493, | Amidation 130-133, |
| | | | 1.147; 321-328, | 332-335, 497-500; |
| | | | 1.147; 74-80, | Asn_Glycosylation 79-82, |
| | | | 1.128; 201-225, | 341-344, 348-351, |
| | | | 1.125; 389-411, | 506-509, 513-516; |
| | | | 1.125; 22-30, | Camp_Phospho_Site |
| | | | 1.12; 526-546, | 132-135, 188-191, 334-337, |
| | | | 1.115; 265-271, | 499-502; |
| | | | 1.108; 293-299, | Ck2_Phospho_Site 73-76, |
| | | | 1.101; 458-464, | 210-213, 288-291, |
| | | | 1.101; 187-196, | 549-552; Myristyl 68-73, |
| | | | 1.096; 88-95, | 237-242, 272-277, |
| | | | 1.092; 247-255, | 279-284, 282-287, 442-447; |
| | | | 1.079; 235-244, | Pkc_Phospho_Site |
| | | | 1.078; 419-428, | 103-105, 139-141, 163-165, |
| | | | 1.076; 471-480, | 191-193, 337-339, |
| | | | 1.072; 132-140, | 392-394, 437-439, 502-504, |
| | | | 1.068; 278-285, | 530-532, 549-551; |
| | | | 1.055; 309-315, | |
| | | | 1.046 | |
| DEX0374_56.aa.13 | N | 0 -o | 105-115, 1.217; | Zinc_Finger_C2h2 114-134, |
| | | | 161-171, 1.187; | 142-162, 169-190, |
| | | | 133-143, 1.158; | 170-190; Amidation |
| | | | 174-194, 1.115; | 117-120; |
| | | | 24-39, 1.115; 12-18, | Asn_Glycosylation 13-16; |
| | | | 1.102; 93-101, | Camp_Phospho_Site |
| | | | 1.095; 119-127, | 119-122, 175-178; |
| | | | 1.068; 45-54, | Ck2_Phospho_Site 83-86, |
| | | | 1.035 | 106-109, 197-200; |
| | | | | Glycosaminoglycan |
| | | | | 107-110; Myristyl 7-12, |
| | | | | 12-17, 14-19, 70-75; |
| | | | | Pkc_Phospho_Site |
| | | | | 76-78, 126-128, 150-152, |
| | | | | 178-180, 197-199; |
| DEX0374_60.aa.3 | N | 0 -o | 35-61, 1.222; 64-73, | Asn_Glycosylation |
| | | | 1.16, 101-112, | 106-109; |
| | | | 1.122; 5-12, | Ck2_Phospho_Site 96-99; |
| | | | 1.072 | Myristyl 3-8, 46-51; |
| | | | | Tyr_Phospho_Site |
| | | | | 36-44; |
| DEX0374_70.aa.2 | N | 0 -o | 10-16, 1.094; 32-49, | Ck2_Phospho_Site 60-63; |
| | | | 1.092 | Myristyl 30-35, |
| | | | | 33-38; |
| DEX0374_70.aa.3 | N | 0 -i | 10-16, 1.094; 32-49, | Myristyl 30-35, 33-38; |
| | | | 1.092 | |
| DEX0374_73.aa.3 | y | 7 - | 4-253, 1.334; 282-318, | Leucine_Zipper 129-150; |
| | | 020- | 1.14; 263-270, | Myristyl 12-17, |
| | | 42i55- | 1.114 | 237-242, 278-283; |
| | | 77o81- | | Pkc_Phospho_Site 15-17, |
| | | 103i12 | | 172-174, 175-177, |
| | | 0- | | 299-301; |
| | | 142o15 | | Prokar_Lipoprotein |
| | | 2- | | 64-74, 108-118, 110-120, |
| | | 171i17 | | 228-238; |
| | | 8- | | |
| | | 200o22 | | |
| | | 4-246i | | |
| DEX0374_73.aa. 8 | N | 0 -o | 83-146, 1.214; 5-77, | Ck2_Phospho_Site 30-33, |
| | | | 1.186 | 77-80; |
| | | | | Leucine_Zipper 69-90; |
| | | | | Myristyl 110-115; |
| | | | | Pkc_Phospho_Site 143-145; |
| DEX0374_73.aa.9 | N | 0 -o | 79-87, 1.201; 180-214, | Asn_Glycosylation 35-38, |
| | | | 1.193; 273-282, | 258-261, 343-346; |
| | | | 1.175; 4-27, | Camp_Phospho_Site |
| | | | 1.173; 295-314, | 220-223; |
| | | | 1.169; 56-76, | Ck2_Phospho_Site 37-40, |
| | | | 1.168; 321-329, | 138-141; |
| | | | 1.152; 237-245, | GlycosaminoglyCan |
| | | | 1.151; 338-345, | 276-279; Myristyl 68-73, |
| | | | 1.148; 140-155, | 174-179, 186-191, |
| | | | 1.147; 371-384, | 209-214, 224-229, 272-277; |
| | | | 1.123; 89-104, | Pkc_Phospho_Site |
| | | | 1.121; 34-40, | 47-49, 153-155, 178-180, |
| | | | 1.115; 167-176, | 218-220, 251-253, |
| | | | 1.112; 116-126, | 289-291, 372-374; |
| | | | 1.106; 255-261, | |
| | | | 1.098; 128-134, | |
| | | | 1.092; 361-368, | |
| | | | 1.084; 351-357, | |
| | | | 1.076 | |
| DEX0374_73.aa.11 | N | 0 -o | 10-16, 1.024 | Pkc_Phospho_Site 19-21, |
| | | | | 25-27; |
| DEX0374_73.aa.12 | N | 0 -o | 79-87, 1.201; 166-175, | Asn_Glycosylation 35-38; |
| | | | 1.188; 4-27, | Ck2_Phospho_Site |
| | | | 1.173; 56-76, | 37-40; Myristyl 68-73, |
| | | | 1.168; 89-104, | 148-153; |
| | | | 1.121; 34-40, | Pkc_Phospho_Site 47-49; |
| | | | 1.115; 116-126, | |
| | | | 1.106; 128-139, | |
| | | | 1.098; 150-156, | |
| | | | 1.067 | |
| DEX0374_80.aa.2 | N | 1 - | 607-619, 1.309; | Amidation 321-324; |
| | | o704-726i | 219-253, 1.257; | Asn_Glycosylation 82-85, |
| | | | 703-725, 1.239; | 154-157, 524-527, |
| | | | 153-172, 1.217; | 545-548; |
| | | | 107-150, 1.215; | Camp_Phospho_Site |
| | | | 257-265, 1.202; 9-35, | 323-326, 337-340; |
| | | | 1.178; 649-675, | Ck2_Phospho_Site 184-187, |
| | | | 1.167; 621-640, | 201-204, 217-220, |
| | | | 1.166; 501-517, | 340-343, 345-348, 398-401, |
| | | | 1.16; 363-375, | 446-449, 529-532, |
| | | | 1.157; 269-295, | 602-605, 670-673; |
| | | | 1.153; 308-315, | Glycosaminoglycan |
| | | | 1.147; 678-690, | 328-331; Myristyl 45-50, |
| | | | 1.139; 474-481, | 48-53, 49-54, 51-56, |
| | | | 1.128; 593-605, | 52-57, 53-58, 54-59, |
| | | | 1.115; 344-350, | 55-60, 67-72, 80-85, |
| | | | 1.111; 297-303, | 213-218, 331-336, |
| | | | 1.101; 455-465, | 442-447, 489-494, 614-619, |
| | | | 1.099; 544-555, | 662-667; |
| | | | 1.098; 421-430, | Pkc_Phospho_Site 84-86, |
| | | | 1.091; 192-213, | 217-219, 406-408, |
| | | | 1.086; 582-588, | 446-448, 478-480, 573-575; |
| | | | 1.076; 97-103, | Tyr_Phospho_Site |
| | | | 1.074; 532-538, | 300-306; Pts_Hpr_Ser |
| | | | 1.073; 488-494, | 474-489; |
| | | | 1.049; 178-184, | |
| | | | 1.033 | |
| DEX0374_80.aa.5 | N | 0 -o | 565-577, 1.309; | Amidation 279-282; |
| | | | 177-211, 1.257; | Asn_Glycosylation 82-85, |
| | | | 107-151, 1.215; | 482-485, 503-506; |
| | | | 215-223, 1.202; | Camp_Phospho_Site |
| | | | 607-651, 1.191; 9-35, | 281-284, 295-298; |
| | | | 1.178; 579-598, | Ck2_Phospho_Site 175-178, |
| | | | 1.166; 459-475, | 298-301, 303-306, |
| | | | 1.16; 321-333, | 356-359, 404-407, 487-490, |
| | | | 1.157; 227-253, | 560-563; |
| | | | 1.153; 266-273, | Glycosaminoglycan |
| | | | 1.147; 432-439, | 286-289; Myristyl 45-50, |
| | | | 1.128; 551-563, | 48-53, 49-54, 51-56, |
| | | | 1.115; 302-308, | 52-57, 53-58, 54-59, |
| | | | 1.111; 255-261, | 55-60, 67-72, 80-85, |
| | | | 1.101; 413-423, | 171-176, 289-294, |
| | | | 1.099; 502-513, | 400-405, 447-452, 572-577; |
| | | | 1.098; 379-388, | Pkc_Phospho_Site |
| | | | 1.091; 540-546, | 84-86, 175-177, 364-366, |
| | | | 1.076; 97-103, | 404-406, 436-438, |
| | | | 1.074; 490-496, | 531-533; |
| | | | 1.073; 157-171, | Tyr_Phospho_Site 258-264; |
| | | | 1.069; 446-452, | Pts_Hpr_Ser 432-447; |
| | | | 1.049 | |
| DEX0374_80.aa.7 | N | 0 -o | 607-619, 1.309; | Amidation 321-324; |
| | | | 219-253, 1.257; | Asn_Glycosylation 82-85, |
| | | | 153-172, 1.217; | 154-157, 524-527, |
| | | | 107-150, 1.215; | 545-548; |
| | | | 257-265, 1.202; | Camp_Phospho_Site |
| | | | 649-693, 1.191; 9-35, | 323-326, 337-340; |
| | | | 1.178; 621-640, | Ck2_Phospho_Site 184-187, |
| | | | 1.166; 501-517, | 201-204, 217-220, |
| | | | 1.16; 363-375, | 340-343, 345-348, 398-401, |
| | | | 1.157; 269-295, | 446-449, 529-532, |
| | | | 1.153; 308-315, | 602-605; |
| | | | 1.147; 474-481, | Glycosaminoglycan |
| | | | 1.128; 593-605, | 328-331; Myristyl 45-50, |
| | | | 1.115; 344-350, | 48-53, 49-54, 51-56, |
| | | | 1.111; 297-303, | 52-57, 53-58, 54-59, |
| | | | 1.101; 455-465, | 55-60, 67-72, 80-85, |
| | | | 1.099; 544-555, | 213-218, 331-336, |
| | | | 1.098; 421-430, | 442-447, 489-494, 614-619; |
| | | | 1.091; 192-213, | Pkc_Phospho_Site |
| | | | 1.086; 582-588, | 84-86, 217-219, 406-408, |
| | | | 1.076; 97-103, | 446-448, 478-480, |
| | | | 1.074; 532-538, | 573-575; |
| | | | 1.073; 488-494, | Tyr_Phospho_Site 300-306; |
| | | | 1.049; 178-184, | Pts_Hpr_Ser 474-489; |
| | | | 1.033 | |
| DEX0374_80.aa.8 | N | 0 -i | 11-55, 1.191 | |
| DEX0374_80.aa.10 | y | 0 -o | 4-22, 1.275; 30-62, | Ck2_Phospho_Site 32-35; |
| | | | 1.191 | Pkc_Phospho_Site |
| | | | | 27-29; |
| DEX0374_80.aa.13 | N | 0 -o | 219-253, 1.257; | Amidation 321-324; |
| | | | 153-172, 1.217; | Asn_Glycosylation 82-85, |
| | | | 107-150, 1.215; | 154-157, 524-527; |
| | | | 257-265, 1.202; 9-35, | Camp_Phospho_Site |
| | | | 1.178; 501-517, | 323-326, 337-340; |
| | | | 1.16; 363-375, | Ck2_Phospho_Site 184-187, |
| | | | 1.157; 269-295, | 201-204, 217-220, |
| | | | 1.153; 308-315, | 340-343, 345-348, 398-401, |
| | | | 1.147; 474-481, | 446-449, 529-532; |
| | | | 1.128; 344-350, | Glycosaminoglycan |
| | | | 1.111; 297-303, | 328-331; Myristyl 45-50, |
| | | | 1.101; 455-465, | 48-53, 49-54, 51-56, |
| | | | 1.099; 525-532, | 52-57, 53-58, 54-59, |
| | | | 1.096; 421-430, | 55-60, 67-72, 80-85, |
| | | | 1.091; 192-213, | 213-218, 331-336, |
| | | | 1.086; 97-103, | 442-447, 489-494; |
| | | | 1.074; 488-494, | Pkc_Phospho_Site 84-86, |
| | | | 1.049; 178-184, | 217-219, 406-408, |
| | | | 1.033 | 446-448, 478-480; |
| | | | | Tyr_Phospho_Site 300-306; |
| | | | | Pts_Hpr_Ser 474-489; |
| DEX0374_80.aa.14 | N | 0 -o | 219-253, 1.257; | Asn_Glycosylation 82-85, |
| | | | 153-172, 1.217; | 154-157; |
| | | | 107-150, 1.215; | Ck2_Phospho_Site 184-187, |
| | | | 257-265, 1.202; 9-35, | 201-204, 217-220; |
| | | | 1.178; 269-295, | Myristyl 45-50, 48-53, |
| | | | 1.153; 308-314, | 49-54, 51-56, 52-57, |
| | | | 1.147; 297-303, | 53-58, 54-59, 55-60, |
| | | | 1.101; 192-213, | 67-72, 80-85, 213-218; |
| | | | 1.086; 97-103, | Pkc_Phospho_Site |
| | | | 1.074; 178-184, | 84-86, 217-219; |
| | | | 1.033 | Tyr_Phospho_Site 300-306; |
| DEX0374_80.aa.16 | N | 0 -o | 90-102, 1.309; | Asn_Glycosylation 28-31; |
| | | | 132-176, 1.191; | Ck2_Phospho_Site |
| | | | 104-123, 1.166; | 12-15, 85-88; Myristyl |
| | | | 76-88, 1.115; 27-38, | 97-102; |
| | | | 1.098; 65-71, | Pkc_Phospho_Site 56-58; |
| | | | 1.076; 15-21, | |
| | | | 1.073 | |
| DEX0374_80.aa.18 | N | 0 -o | 9-35, 1.178; 57-74, | Myristyl 45-50, 48-53, |
| | | | 1.161 | 49-54, 51-56, 52-57, |
| | | | | 53-58, 54-59, 55-60; |
| | | | | Pkc_Phospho_Site |
| | | | | 76-78; |
| DEX0374_80.aa.19 | N | 0 -o | 219-253, 1.257; | Amidation 321-324; |
| | | | 153-172, 1.217; | Asn_Glycosylation 82-85, |
| | | | 107-150, 1.215; | 154-157; |
| | | | 257-265, 1.202; | Camp_Phospho_Site |
| | | | 488-499, 1.188; 9-35, | 323-326, 337-340; |
| | | | 1.178; 363-375, | Ck2_Phospho_Site 184-187, |
| | | | 1.157; 269-295, | 201-204, 217-220, |
| | | | 1.153; 308-315, | 340-343, 345-348, 398-401, |
| | | | 1.147; 474-481, | 446-449; |
| | | | 1.128; 344-350, | Glycosaminoglycan |
| | | | 1.111; 297-303, | 328-331; Myristyl 45-50, |
| | | | 1.101; 455-465, | 48-53, 49-54, 51-56, |
| | | | 1.099; 421-430, | 52-57, 53-58, 54-59, |
| | | | 1.091; 192-213, | 55-60, 67-72, 80-85, |
| | | | 1.086; 97-103, | 213-218, 331-336, |
| | | | 1.074; 178-184, | 442-447, 489-494; |
| | | | 1.033 | Pkc_Phospho_Site 84-86, |
| | | | | 217-219, 406-408, |
| | | | | 446-448, 478-480; |
| | | | | Tyr_Phospho_Site 300-306; |
| | | | | Pts_Hpr_Ser 474-489; |
| DEX0374_80.aa.20 | N | 0 -o | 107-148, 1.215; 9-35, | Asn_Glycosylation 82-85; |
| | | | 1.178; 97-103, | Myristyl 45-50, |
| | | | 1.074 | 48-53, 49-54, 51-56, |
| | | | | 52-57, 53-58, 54-59, |
| | | | | 55-60, 67-72, 80-85, |
| | | | | pkc_Phospho_Site 84-86, |
| DEX0374_82.aa.6 | N | 0 -o | 88-110, 1.23; 4-77, | Ck2_Phospho_Site 32-35; |
| | | | 1.182; 138-159, | Myristyl 13-18, |
| | | | 1.156; 118-136, | 69-74, 95-100, 136-141; |
| | | | 1.148; 79-86, | Pkc_Phospho_Site |
| | | | 1.094 | 36-38, 59-61, 82-84; |
| DEX0374_82.aa.7 | N | 0 -o | 8-56, 1.177; 88-100, | Amidation 170-173; |
| | | | 1.176; 141-149, | Ck2_Phospho_Site 131-134; |
| | | | 1.169; 114-122, | Myristyl 19-24; |
| | | | 1.165; 124-133, | Pkc_Phospho_Site 71-73, |
| | | | 1.148; 179-186, | 155-157, 158-160, |
| | | | 1.121; 70-82, | 178-180; |
| | | | 1.099; 167-174, | |
| | | | 1.081 | |
| DEX0374_82.aa.9 | N | 1 - | 59-83, 1.182; 21-56, | Asn_Glycosylation 43-46; |
| | | i28- | 1.171 | Ck2_Phospho_Site |
| | | 50o | | 12-15, 13-16; |
| DEX0374_85.aa.5 | N | 2 - | 15-50, 1.212; 62-91, | Myristyl 36-41, 47-52, |
| | | o10- | 1.182; 5-11, | 81-86; |
| | | 32i64- | 1.051 | Pkc_Phospho_Site 57-59; |
| | | 86o | | |
| DEX0374_85.aa.6 | N | 2 - | 15-50, 1.212; 62-91, | Myristyl 36-41, 47-52 |
| | | o10- | 1.182; 5-11, | 81-86; |
| | | 32i64- | 1.051 | Pkc_Phospho_Site 57-59; |
| | | 86o | | |
| DEX0374_85.aa.11 | N | 0 -o | 18-30, 1.198; 37-49, | Ck2_Phospho_Site 36-39; |
| | | | 1.153 | Myristyl 56-61, |
| | | | | 67-72, 76-81; |
| DEX0374_85.aa.20 | N | 0 -o | 68-89, 1.203; 121-141, | Ck2_Phospho_Site 97-100, |
| | | | 1.144; 97-112, | 121-124; Myristyl |
| | | | 1.139; 52-58, | 58-63, 61-66, 63-68, |
| | | | 1.055; 20-27, | 64-69; |
| | | | 1.054; 7-13, | Pkc_Phospho_Site 7-9, |
| | | | 1.052 | 97-99; |
| DEX0374_86.aa.2 | N | 0 -o | 65-110, 1.211; | Ck2_Phospho_Site 15-18, |
| | | | 116-124, 1.16; 14-25, | 29-32; Myristyl |
| | | | 1.16; 49-63 | 105-110; |
| | | | 1.113 | Pkc_Phospho_Site 9-11, |
| | | | | 48-50; |
| DEX0374_88.aa.3 | N | 0 -o | 118-131, 1.139; | Asn_Glycosylation |
| | | | 35-50, 1.098; 76-93, | 107-110; |
| | | | 1.086; 12-18, | Camp_Phospho_Site |
| | | | 1.061 | 102-105; |
| | | | | Ck2_Phospho_Site 9-12, |
| | | | | 24-27; |
| DEX0374_95.aa.2 | N | 0 -o | 90-119, 1.156; 57-67, | Glycosaminoglycan 19-22, |
| | | | 1.132; 18-29, | 132-135; Myristyl |
| | | | 1.106; 35-51, | 58-63, 128-133, 131-136; |
| | | | 1.095; 4-10, | Pkc_Phospho_Site |
| | | | 1.089; 71-77, | 19-21, 62-64, 73-75, |
| | | | 1.082 | 132-134; |

### Example 2

### Relative Quantitation of Gene Expression

[0429] Real-Time quantitative PCR with fluorescent Taqman® probes is a quantitation detection system utilizing the 5′-3′ nuclease activity of Taq DNA polymerase. The method uses an internal fluorescent oligonucleotide probe (Taqman®) labeled with a 5′ reporter dye and a downstream, 3′ quencher dye. During PCR, the 5′-3′ nuclease activity of Taq DNA polymerase releases the reporter, whose fluorescence can then be detected by the laser detector of the Model 7700 Sequence Detection System (PE Applied Biosystems, Foster City, Calif., USA). Amplification of an endogenous control is used to standardize the amount of sample RNA added to the reaction and normalize for Reverse Transcriptase (RT) efficiency. Either cyclophilin, glyceraldehyde-3-phosphate dehydrogenase (GAPDH), ATPase, or 18S ribosomal RNA (rRNA) is used as this endogenous control. To calculate relative quantitation between all the samples studied, the target RNA levels for one sample were used as the basis for comparative results (calibrator). Quantitation relative to the “calibrator” can be obtained using the comparative method (User Bulletin #2: ABI PRISM 7700 Sequence Detection System).

[0430] The tissue distribution and the level of the target gene are evaluated for every sample in normal and cancer tissues. Total RNA is extracted from normal tissues, cancer tissues, and from cancers and the corresponding matched adjacent tissues. Subsequently, first strand cDNA is prepared with reverse transcriptase and the polymerase chain reaction is done using primers and Taqman® probes specific to each target gene. The results are analyzed using the ABI PRISM 7700 Sequence Detector. The absolute numbers are relative levels of expression of the target gene in a particular tissue compared to the calibrator tissue.

[0431] One of ordinary skill can design appropriate primers. The relative levels of expression of the HSNA versus normal tissues and other cancer tissues can then be determined. All the values are compared to the calibrator. Normal RNA samples are commercially available pools, originated by pooling samples of a particular tissue from different individuals.

[0432] The relative levels of expression of the HSNA in pairs of matched samples may also be determined. A matched pair is formed by mRNA from the cancer sample for a particular tissue and mRNA from the normal adjacent sample for that same tissue from the same individual. All the values are compared to the calibrator.

[0433] In the analysis of matching samples, the HSNAs that show a high degree of tissue specificity for the tissue of interest. These results confirm the tissue specificity results obtained with normal pooled samples. Further, the level of mRNA expression in cancer samples and the isogenic normal adjacent tissue from the same individual are compared. This comparison provides an indication of specificity for the cancer state (e.g. higher levels of mRNA expression in the cancer sample compared to the normal adjacent).

[0434] Altogether, the high level of tissue specificity, plus the mRNA overexpression in matched samples tested are indicative of SEQ ID NO: 1-409 being a diagnostic marker for cancer.

### Example 3

### Protein Expression

[0435] The HSNA is amplified by polymerase chain reaction (PCR) and the amplified DNA fragment encoding the HSNA is subcloned in pET-21d for expression in E. coli. In addition to the HSNA coding sequence, codons for two amino acids, Met-Ala, flanking the NH₂-terminus of the coding sequence of HSNA, and six histidines, flanking the COOH-terminus of the coding sequence of HSNA, are incorporated to serve as initiating Met/restriction site and purification tag, respectively.

[0436] An over-expressed protein band of the appropriate molecular weight may be observed on a Coomassie blue stained polyacrylamide gel. This protein band is confirmed by Western blot analysis using monoclonal antibody against 6× Histidine tag.

[0437] Large-scale purification of HSP is achieved using cell paste generated from 6-liter bacterial cultures, and purified using immobilized metal affinity chromatography (IMAC). Soluble fractions that are separated from total cell lysate were incubated with a nickel chelating resin. The column is packed and washed with five column volumes of wash buffer. HSP is eluted stepwise with various concentration imidazole buffers.

### Example 4

### Fusion Proteins

[0438] The human Fc portion of the IgG molecule can be PCR amplified, using primers that span the 5′ and 3′ ends of the sequence described below. These primers also should have convenient restriction enzyme sites that will facilitate cloning into an expression vector, preferably a mammalian expression vector. For example, if pC4 (Accession No. 209646) is used, the human Fc portion can be ligated into the BamHI cloning site. Note that the 3′ BamHI site should be destroyed. Next, the vector containing the human Fe portion is re-restricted with BamHI, linearizing the vector, and a polynucleotide of the present invention, isolated by the PCR protocol described in Example 2, is ligated into this BamHI site. Note that the polynucleotide is cloned without a stop codon, otherwise a fusion protein will not be produced. If the naturally occurring signal sequence is used to produce the secreted protein, pC4 does not need a second signal peptide. Alternatively, if the naturally occurring signal sequence is not used, the vector can be modified to include a heterologous signal sequence. See, e.g., WO 96/34891.

### Example 5

### Production of an Antibody from a Polypeptide

[0439] In general, such procedures involve immunizing an animal (preferably a mouse) with polypeptide or, more preferably, with a secreted polypeptide-expressing cell. Such cells may be cultured in any suitable tissue culture medium; however, it is preferable to culture cells in Earle's modified Eagle's medium supplemented with 10% fetal bovine serum (inactivated at about 56° C.), and supplemented with about 10 g/l of nonessential amino acids, about 1,000 U/ml of penicillin, and about 100, μg/ml of streptomycin. The splenocytes of such mice are extracted and fused with a suitable myeloma cell line. Any suitable myeloma cell line may be employed in accordance with the present invention; however, it is preferable to employ the parent myeloma cell line (SP20), available from the ATCC. After fusion, the resulting hybridoma cells are selectively maintained in HAT medium, and then cloned by limiting dilution as described by Wands et al., Gastroenterology 80: 225-232 (1981).

[0440] The hybridoma cells obtained through such a selection are then assayed to identify clones which secrete antibodies capable of binding the polypeptide. Alternatively, additional antibodies capable of binding to the polypeptide can be produced in a two-step procedure using anti-idiotypic antibodies. Such a method makes use of the fact that antibodies are themselves antigens, and therefore, it is possible to obtain an antibody which binds to a second antibody. In accordance with this method, protein specific antibodies are used to immunize an animal, preferably a mouse. The splenocytes of such an animal are then used to produce hybridoma cells, and the hybridoma cells are screened to identify clones which produce an antibody whose ability to bind to the protein-specific antibody can be blocked by the polypeptide. Such antibodies comprise anti-idiotypic antibodies to the protein specific antibody and can be used to immunize an animal to induce formation of further protein-specific antibodies.

### Example 6

### Method of Determining Alterations in a Gene Corresponding to a Polynucleotide

[0441] RNA is isolated from individual patients or from a family of individuals that have a phenotype of interest. cDNA is then generated from these RNA samples using protocols known in the art. See, Sambrook (2001), supra. The cDNA is then used as a template for PCR, employing primers surrounding regions of interest in SEQ ID NO: 1-409. Suggested PCR conditions consist of 35 cycles at 95° C. for 30 seconds; 60-120 seconds at 52-58° C.; and 60-120 seconds at 70° C., using buffer solutions described in Sidransky et al., Science 252(5006): 706-9 (1991). See also Sidransky et al., Science 278(5340): 1054-9 (1997).

[0442] PCR products are then sequenced using primers labeled at their 5′ end with T4 polynucleotide kinase, employing SequiTherm Polymerase. (Epicentre Technologies). The intron-exon borders of selected exons are also determined and genomic PCR products analyzed to confirm the results. PCR products harboring suspected mutations are then cloned and sequenced to validate the results of the direct sequencing. PCR products is cloned into T-tailed vectors as described in Holton et al., Nucleic Acids Res., 19: 1156 (1991) and sequenced with T7 polymerase (United States Biochemical). Affected individuals are identified by mutations not present in unaffected individuals.

[0443] Genomic rearrangements may also be determined. Genomic clones are nick-translated with digoxigenin deoxyuridine 5′ triphosphate (Boehringer Manheim), and FISH is performed as described in Johnson et al., Methods Cell Biol. 35: 73-99 (1991). Hybridization with the labeled probe is carried out using a vast excess of human cot-1 DNA for specific hybridization to the corresponding genomic locus.

[0444] Chromosomes are counterstained with 4,6-diamino-2-phenylidole and propidium iodide, producing a combination of C- and R-bands. Aligned images for precise mapping are obtained using a triple-band filter set (Chroma Technology, Brattleboro, Vt.) in combination with a cooled charge-coupled device camera (Photometrics, Tucson, Ariz.) and variable excitation wavelength filters. Johnson (1991). Image collection, analysis and chromosomal fractional length measurements are performed using the ISee Graphical Program System. (Inovision Corporation, Durham, N.C.) Chromosome alterations of the genomic region hybridized by the probe are identified as insertions, deletions, and translocations. These alterations are used as a diagnostic marker for an associated disease.

### Example 7

### Method of Detecting Abnormal Levels of a Polypeptide in a Biological Sample

[0445] Antibody-sandwich ELISAs are used to detect polypeptides in a sample, preferably a biological sample. Wells of a microtiter plate are coated with specific antibodies, at a final concentration of 0.2 to 10 ug/ml. The antibodies are either monoclonal or polyclonal and are produced by the method described above. The wells are blocked so that non-specific binding of the polypeptide to the well is reduced. The coated wells are then incubated for >2 hours at RT with a sample containing the polypeptide. Preferably, serial dilutions of the sample should be used to validate results. The plates are then washed three times with deionized or distilled water to remove unbound polypeptide. Next, 50 μl of specific antibody-alkaline phosphatase conjugate, at a concentration of 25-400 ng, is added and incubated for 2 hours at room temperature. The plates are again washed three times with deionized or distilled water to remove unbound conjugate. 75 μl of 4-methylumbelliferyl phosphate (MUP) or p-nitrophenyl phosphate (NPP) substrate solution are added to each well and incubated 1 hour at room temperature.

[0446] The reaction is measured by a microtiter plate reader. A standard curve is prepared, using serial dilutions of a control sample, and polypeptide concentrations are plotted on the X-axis (log scale) and fluorescence or absorbance on the Y-axis (linear scale). The concentration of the polypeptide in the sample is calculated using the standard curve.

### Example 8

### Formulating a Polypeptide

[0447] The secreted polypeptide composition will be formulated and dosed in a fashion consistent with good medical practice, taking into account the clinical condition of the individual patient (especially the side effects of treatment with the secreted polypeptide alone), the site of delivery, the method of administration, the scheduling of administration, and other factors known to practitioners. The “effective amount” for purposes herein is thus determined by such considerations.

[0448] As a general proposition, the total pharmaceutically effective amount of secreted polypeptide administered parenterally per dose will be in the range of about 1, μg/kg/day to 10 mg/kg/day of patient body weight, although, as noted above, this will be subject to therapeutic discretion. More preferably, this dose is at least 0.01 mg/kg/day, and most preferably for humans between about 0.01 and 1 mg/kg/day for the hormone. If given continuously, the secreted polypeptide is typically administered at a dose rate of about 1 μg/kg/hour to about 50 mg/kg/hour, either by 1-4 injections per day or by continuous subcutaneous infusions, for example, using a mini-pump. An intravenous bag solution may also be employed. The length of treatment needed to observe changes and the interval following treatment for responses to occur appears to vary depending on the desired effect.

[0449] Pharmaceutical compositions containing the secreted protein of the invention are administered orally, rectally, parenterally, intracistemally, intravaginally, intraperitoneally, topically (as by powders, ointments, gels, drops or transdermal patch), bucally, or as an oral or nasal spray. “Pharmaceutically acceptable carrier” refers to a non-toxic solid, semisolid or liquid filler, diluent, encapsulating material or formulation auxiliary of any type. The term “parenteral” as used herein refers to modes of administration which include intravenous, intramuscular, intraperitoneal, intrasternal, subcutaneous and intraarticular injection and infusion.

[0450] The secreted polypeptide is also suitably administered by sustained-release systems. Suitable examples of sustained-release compositions include semipermeable polymer matrices in the form of shaped articles, e.g., films, or microcapsules. Sustained-release matrices include polylactides (U.S. Pat. No. 3,773,919, EP 58,481, the contents of which are hereby incorporated by reference herein in their entirety), copolymers of L-glutamic acid and gamma-ethyl-L-glutamate (Sidman, U. et al., Biopolymers 22: 547-556 (1983)), poly(2-hydroxyethyl methacrylate) (R. Langer et al., J. Biomed. Mater. Res. 15: 167-277 (1981), and R. Langer, Chem. Tech. 12: 98-105 (1982)), ethylene vinyl acetate (R. Langer et al.) or poly-D-(−)-3-hydroxybutyric acid (EP 133,988). Sustained-release compositions also include liposomally entrapped polypeptides. Liposomes containing the secreted polypeptide are prepared by methods known per se: DE Epstein et al., Proc. Natl. Acad. Sci. USA 82: 3688-3692 (1985); Hwang et al., Proc. Natl. Acad. Sci. USA 77: 4030-4034 (1980); EP 52,322; EP 36,676; EP 88,046; EP 143,949; EP 142,641; Japanese Pat. Appl. 83-118008; U.S. Pat. Nos. 4,485,045 and 4,544,545; and EP 102,324, the contents of which are hereby incorporated by reference herein in their entirety. Ordinarily, the liposomes are of the small (about 200-800 Angstroms) unilamellar type in which the lipid content is greater than about 30 mol. percent cholesterol, the selected proportion being adjusted for the optimal secreted polypeptide therapy.

[0451] For parenteral administration, in one embodiment, the secreted polypeptide is formulated generally by mixing it at the desired degree of purity, in a unit dosage injectable form (solution, suspension, or emulsion), with a pharmaceutically acceptable carrier, i.e., one that is non-toxic to recipients at the dosages and concentrations employed and is compatible with other ingredients of the formulation.

[0452] For example, the formulation preferably does not include oxidizing agents and other compounds that are known to be deleterious to polypeptides. Generally, the formulations are prepared by contacting the polypeptide uniformly and intimately with liquid carriers or finely divided solid carriers or both. Then, if necessary, the product is shaped into the desired formulation. Preferably, the carrier is a parenteral carrier, more preferably, a solution that is isotonic with the blood of the recipient. Examples of such carrier vehicles include water, saline, Ringer's solution, and dextrose solution. Non-aqueous vehicles such as fixed oils and ethyl oleate are also useful herein, as well as liposomes.

[0453] The carrier suitably contains minor amounts of additives such as substances that enhance isotonicity and chemical stability. Such materials are non-toxic to recipients at the dosages and concentrations employed, and include buffers such as phosphate, citrate, succinate, acetic acid, and other organic acids or their salts; antioxidants such as ascorbic acid; low molecular weight (less than about ten residues) polypeptides, e.g., polyarginine or tripeptides; proteins, such as serum albumin, gelatin, or immunoglobulins; hydrophilic polymers such as polyvinylpyrrolidone; amino acids, such as glycine, glutamic acid, aspartic acid, or arginine; monosaccharides, disaccharides, and other carbohydrates including cellulose or its derivatives, glucose, manose, or dextrins; chelating agents such as EDTA; sugar alcohols such as mannitol or sorbitol; counterions such as sodium; and/or nonionic surfactants such as polysorbates, poloxamers, or PEG.

[0454] The secreted polypeptide is typically formulated in such vehicles at a concentration of about 0.1 mg/ml to 100 mg/ml, preferably 1-10 mg/ml, at a pH of about 3 to 8. It will be understood that the use of certain of the foregoing excipients, carriers, or stabilizers will result in the formation of polypeptide salts.

[0455] Any polypeptide to be used for therapeutic administration can be sterile. Sterility is readily accomplished by filtration through sterile filtration membranes (e.g., 0.2 micron membranes). Therapeutic polypeptide compositions generally are placed into a container having a sterile access port, for example, an intravenous solution bag or vial having a stopper pierceable by a hypodermic injection needle.

[0456] Polypeptides ordinarily will be stored in unit or multi-dose containers, for example, sealed ampules or vials, as an aqueous solution or as a lyophilized formulation for reconstitution. As an example of a lyophilized formulation, 10-ml vials are filled with 5 ml of sterile-filtered 1% (w/v) aqueous polypeptide solution, and the resulting mixture is lyophilized. The infusion solution is prepared by reconstituting the lyophilized polypeptide using bacteriostatic Water-for-Injection.

[0457] The invention also provides a pharmaceutical pack or kit comprising one or more containers filled with one or more of the ingredients of the pharmaceutical compositions of the invention. Associated with such container (s) can be a notice in the form prescribed by a governmental agency regulating the manufacture, use or sale of pharmaceuticals or biological products, which notice reflects approval by the agency of manufacture, use or sale for human administration. In addition, the polypeptides of the present invention may be employed in conjunction with other therapeutic compounds.

### Example 9

### Method of Treating Decreased Levels of the Polypeptide

[0458] It will be appreciated that conditions caused by a decrease in the standard or normal expression level of a secreted protein in an individual can be treated by administering the polypeptide of the present invention, preferably in the secreted form. Thus, the invention also provides a method of treatment of an individual in need of an increased level of the polypeptide comprising administering to such an individual a pharmaceutical composition comprising an amount of the polypeptide to increase the activity level of the polypeptide in such an individual.

[0459] For example, a patient with decreased levels of a polypeptide receives a daily dose 0.1-100 ug/kg of the polypeptide for six consecutive days. Preferably, the polypeptide is in the secreted form. The exact details of the dosing scheme, based on administration and formulation, are provided above.

### Example 10

### Method of Treating Increased Levels of the Polypeptide

[0460] Antisense or RNAi technology are used to inhibit production of a polypeptide of the present invention. This technology is one example of a method of decreasing levels of a polypeptide, preferably a secreted form, due to a variety of etiologies, such as cancer.

[0461] For example, a patient diagnosed with abnormally increased levels of a polypeptide is administered intravenously antisense polynucleotides at 0.5, 1.0, 1.5, 2.0 and 3.0 mg/kg day for 21 days. This treatment is repeated after a 7-day rest period if the treatment was well tolerated. The formulation of the antisense polynucleotide is provided above.

### Example 11

### Method of Treatment Using Gene Therapy

[0462] One method of gene therapy transplants fibroblasts, which are capable of expressing a polypeptide, onto a patient. Generally, fibroblasts are obtained from a subject by skin biopsy. The resulting tissue is placed in tissue-culture medium and separated into small pieces. Small chunks of the tissue are placed on a wet surface of a tissue culture flask, approximately ten pieces are placed in each flask. The flask is turned upside down, closed tight and left at room temperature over night. After 24 hours at room temperature, the flask is inverted and the chunks of tissue remain fixed to the bottom of the flask and fresh media (e.g., Ham's F12 media, with 10% FBS, penicillin and streptomycin) is added. The flasks are then incubated at 37° C. for approximately one week.

[0463] At this time, fresh media is added and subsequently changed every several days. After an additional two weeks in culture, a monolayer of fibroblasts emerge. The monolayer is trypsinized and scaled into larger flasks. pMV-7 (Kirschmeier, P. T. et al., DNA, 7: 219-25 (1988)), flanked by the long terminal repeats of the Moloney murine sarcoma virus, is digested with EcoRI and HindIII and subsequently treated with calf intestinal phosphatase. The linear vector is fractionated on agarose gel and purified, using glass beads.

[0464] The cDNA encoding a polypeptide of the present invention can be amplified using PCR primers which correspond to the 5′ and 3′end sequences respectively as set forth in Example 3. Preferably, the 5′primer contains an EcoRI site and the 3′primer includes a HindIII site. Equal quantities of the Moloney murine sarcoma virus linear backbone and the amplified EcoRI and HindIII fragment are added together, in the presence of T4 DNA ligase. The resulting mixture is maintained under conditions appropriate for ligation of the two fragments. The ligation mixture is then used to transform bacteria HB 101, which are then plated onto agar containing kanamycin for the purpose of confirming that the vector has the gene of interest properly inserted.

[0465] The amphotropic pA317 or GP+aml2 packaging cells are grown in tissue culture to confluent density in Dulbecco's Modified Eagles Medium (DMEM) with 10% calf serum (CS), penicillin and streptomycin. The MSV vector containing the gene is then added to the media and the packaging cells transduced with the vector. The packaging cells now produce infectious viral particles containing the gene (the packaging cells are now referred to as producer cells).

[0466] Fresh media is added to the transduced producer cells, and subsequently, the media is harvested from a 10 cm plate of confluent producer cells. The spent media, containing the infectious viral particles, is filtered through a millipore filter to remove detached producer cells and this media is then used to infect fibroblast cells. Media is removed from a sub-confluent plate of fibroblasts and quickly replaced with the media from the producer cells. This media is removed and replaced with fresh media.

[0467] If the titer of virus is high, then virtually all fibroblasts will be infected and no selection is required. If the titer is very low, then it is necessary to use a retroviral vector that has a selectable marker, such as neo or his. Once the fibroblasts have been efficiently infected, the fibroblasts are analyzed to determine whether protein is produced.

[0468] The engineered fibroblasts are then transplanted onto the host, either alone or after having been grown to confluence on cytodex 3 microcarrier beads.

### Example 12

### Method of Treatment Using Gene Therapy—In Vivo

[0469] Another aspect of the present invention is using in vivo gene therapy methods to treat disorders, diseases and conditions. The gene therapy method relates to the introduction of naked nucleic acid (DNA, RNA, and antisense DNA or RNA) sequences into an animal to increase or decrease the expression of the polypeptide.

[0470] The polynucleotide of the present invention may be operatively linked to a promoter or any other genetic elements necessary for the expression of the polypeptide by the target tissue. Such gene therapy and delivery techniques and methods are known in the art, see, for example, Tabata H. et al. Cardiovasc. Res. 35 (3): 470-479 (1997); Chao J et al. Pharmacol. Res. 35 (6): 517-522 (1997); Wolff J. A. Neuromuscul. Disord. 7 (5): 314-318 (1997), Schwartz B. et al. Gene Ther. 3 (5): 405-411 (1996); and Tsurumi Y. et al. Circulation 94 (12): 3281-3290 (1996); W0 90/11092, W0 98/11779; U.S. Pat. Nos. 5,693,622; 5,705,151; 5,580,859, the contents of which are hereby incorporated by reference herein in their entirety.

[0471] The polynucleotide constructs may be delivered by any method that delivers injectable materials to the cells of an animal, such as, injection into the interstitial space of tissues (heart, muscle, skin, hepatic, liver, intestine and the like). The polynucleotide constructs can be delivered in a pharmaceutically acceptable liquid or aqueous carrier.

[0472] The term “naked” polynucleotide, DNA or RNA, refers to sequences that are free from any delivery vehicle that acts to assist, promote, or facilitate entry into the cell, including viral sequences, viral particles, liposome formulations, lipofectin or precipitating agents and the like. However, the polynucleotides of the present invention may also be delivered in liposome formulations (such as those taught in Felgner P. L. et al. Ann. NY Acad. Sci. 772: 126-139 (1995) and Abdallah B. et al. Biol. Cell 85 (1): 1-7 (1995)) which can be prepared by methods well known to those skilled in the art.

[0473] The polynucleotide vector constructs used in the gene therapy method are preferably constructs that will not integrate into the host genome nor will they contain sequences that allow for replication. Any strong promoter known to those skilled in the art can be used for driving the expression of DNA. Unlike other gene therapies techniques, one major advantage of introducing naked nucleic acid sequences into target cells is the transitory nature of the polynucleotide synthesis in the cells. Studies have shown that non-replicating DNA sequences can be introduced into cells to provide production of the desired polypeptide for periods of up to six months.

[0474] The polynucleotide construct can be delivered to the interstitial space of tissues within the an animal, including of muscle, skin, brain, hepatic, liver, spleen, bone marrow, thymus, heart, lymph, blood, bone, cartilage, pancreas, kidney, gall bladder, stomach, intestine, testis, ovary, uterus, rectum, nervous system, eye, gland, and connective tissue. Interstitial space of the tissues comprises the intercellular fluid, mucopolysaccharide matrix among the reticular fibers of organ tissues, elastic fibers in the walls of vessels or chambers, collagen fibers of fibrous tissues, or that same matrix within connective tissue ensheathing muscle cells or in the lacunae of bone. It is similarly the space occupied by the plasma of the circulation and the lymph fluid of the lymphatic channels. Delivery to the interstitial space of muscle tissue is preferred for the reasons discussed below. They may be conveniently delivered by injection into the tissues comprising these cells. They are preferably delivered to and expressed in persistent, non-dividing cells which are differentiated, although delivery and expression may be achieved in non-differentiated or less completely differentiated cells, such as, for example, stem cells of blood or skin fibroblasts. In vivo muscle cells are particularly competent in their ability to take up and express polynucleotides.

[0475] For the naked polynucleotide injection, an effective dosage amount of DNA or RNA will be in the range of from about 0.05 μg/kg body weight to about 50 mg/kg body weight. Preferably the dosage will be from about 0.005 mg/kg to about 20 mg/kg and more preferably from about 0.05 mg/kg to about 5 mg/kg. Of course, as the artisan of ordinary skill will appreciate, this dosage will vary according to the tissue site of injection. The appropriate and effective dosage of nucleic acid sequence can readily be determined by those of ordinary skill in the art and may depend on the condition being treated and the route of administration. The preferred route of administration is by the parenteral route of injection into the interstitial space of tissues. However, other parenteral routes may also be used, such as, inhalation of an aerosol formulation particularly for delivery to hepatics or bronchial tissues, throat or mucous membranes of the nose. In addition, naked polynucleotide constructs can be delivered to arteries during angioplasty by the catheter used in the procedure.

[0476] The dose response effects of injected polynucleotide in muscle in vivo is determined as follows. Suitable template DNA for production of mRNA coding for polypeptide of the present invention is prepared in accordance with a standard recombinant DNA methodology. The template DNA, which may be either circular or linear, is either used as naked DNA or complexed with liposomes. The quadriceps muscles of mice are then injected with various amounts of the template DNA.

[0477] Five to six week old female and male Balb/C mice are anesthetized by intraperitoneal injection with 0.3 ml of 2.5% Avertin. A 1.5 cm incision is made on the anterior thigh, and the quadriceps muscle is directly visualized. The template DNA is injected in 0.1 ml of carrier in a 1 cc syringe through a 27 gauge needle over one minute, approximately 0.5 cm from the distal insertion site of the muscle into the knee and about 0.2 cm deep. A suture is placed over the injection site for future localization, and the skin is closed with stainless steel clips.

[0478] After an appropriate incubation time (e.g., 7 days) muscle extracts are prepared by excising the entire quadriceps. Every fifth 15 um cross-section of the individual quadriceps muscles is histochemically stained for protein expression. A time course for protein expression may be done in a similar fashion except that quadriceps from different mice are harvested at different times. Persistence of DNA in muscle following injection may be determined by Southern blot analysis after preparing total cellular DNA and HIRT supernatants from injected and control mice.

[0479] The results of the above experimentation in mice can be use to extrapolate proper dosages and other treatment parameters in humans and other animals using naked DNA.

### Example 13

### Transgenic Animals

[0480] The polypeptides of the invention can also be expressed in transgenic animals. Animals of any species, including, but not limited to, mice, rats, rabbits, hamsters, guinea pigs, pigs, micro-pigs, goats, sheep, cows and non-human primates, e.g., baboons, monkeys, and chimpanzees may be used to generate transgenic animals. In a specific embodiment, techniques described herein or otherwise known in the art, are used to express polypeptides of the invention in humans, as part of a gene therapy protocol.

[0481] Any technique known in the art may be used to introduce the transgene (I. e., polynucleotides of the invention) into animals to produce the founder lines of transgenic animals. Such techniques include, but are not limited to, pronuclear microinjection (Paterson et al., Appl. Microbiol. Biotechnol. 40: 691-698 (1994); Carver et al., Biotechnology 11: 1263-1270 (1993); Wright et al., Biotechnology 9: 830-834 (1991); and U.S. Pat. No. 4,873,191, the contents of which is hereby incorporated by reference herein in its entirety); retrovirus mediated gene transfer into germ lines (Van der Putten et al., Proc. Natl. Acad. Sci., USA 82: 6148-6152 (1985)), blastocysts or embryos; gene targeting in embryonic stem cells (Thompson et al., Cell 56: 313-321 (1989)); electroporation of cells or embryos (Lo, 1983, Mol Cell. Biol. 3: 1803-1814 (1983)); introduction of the polynucleotides of the invention using a gene gun (see, e.g., Ulmer et al., Science 259: 1745 (1993); introducing nucleic acid constructs into embryonic pleuripotent stem cells and transferring the stem cells back into the blastocyst; and sperm mediated gene transfer (Lavitrano et al., Cell 57: 717-723 (1989). For a review of such techniques, see Gordon, “Transgenic Animals,” Intl. Rev. Cytol. 115: 171-229 (1989).

[0482] Any technique known in the art may be used to produce transgenic clones containing polynucleotides of the invention, for example, nuclear transfer into enucleated oocytes of nuclei from cultured embryonic, fetal, or adult cells induced to quiescence (Campell et al., Nature 380: 64-66 (1996); Wilmut et al., Nature 385: 810813 (1997)).

[0483] The present invention provides for transgenic animals that carry the transgene in all their cells, as well as animals which carry the transgene in some, but not all their cells, I. e., mosaic animals or chimeric. The transgene may be integrated as a single transgene or as multiple copies such as in concatamers, e.g., head-to-head tandems or head-to-tail tandems. The transgene may also be selectively introduced into and activated in a particular cell type by following, for example, the teaching of Lasko et al. (Lasko et al., Proc. Natl. Acad. Sci. USA 89: 6232-6236 (1992)). The regulatory sequences required for such a cell-type specific activation will depend upon the particular cell type of interest, and will be apparent to those of skill in the art. When it is desired that the polynucleotide transgene be integrated into the chromosomal site of the endogenous gene, gene targeting is preferred. Briefly, when such a technique is to be utilized, vectors containing some nucleotide sequences homologous to the endogenous gene are designed for the purpose of integrating, via homologous recombination with chromosomal sequences, into and disrupting the function of the nucleotide sequence of the endogenous gene. The transgene may also be selectively introduced into a particular cell type, thus inactivating the endogenous gene in only that cell type, by following, for example, the teaching of Gu et al. (Gu et al., Science 265: 103-106 (1994)). The regulatory sequences required for such a cell-type specific inactivation will depend upon the particular cell type of interest, and will be apparent to those of skill in the art.

[0484] Once transgenic animals have been generated, the expression of the recombinant gene may be assayed utilizing standard techniques. Initial screening may be accomplished by Southern blot analysis or PCR techniques to analyze animal tissues to verify that integration of the transgene has taken place. The level of mRNA expression of the transgene in the tissues of the transgenic animals may also be assessed using techniques which include, but are not limited to, Northern blot analysis of tissue samples obtained from the animal, in situ hybridization analysis, and reverse transcriptase-PCR (rt-PCR). Samples of transgenic gene-expressing tissue may also be evaluated immunocytochemically or immunohistochemically using antibodies specific for the transgene product.

[0485] Once the founder animals are produced, they may be bred, inbred, outbred, or crossbred to produce colonies of the particular animal. Examples of such breeding strategies include, but are not limited to: outbreeding of founder animals with more than one integration site in order to establish separate lines; inbreeding of separate lines in order to produce compound transgenics that express the transgene at higher levels because of the effects of additive expression of each transgene; crossing of heterozygous transgenic animals to produce animals homozygous for a given integration site in order to both augment expression and eliminate the need for screening of animals by DNA analysis; crossing of separate homozygous lines to produce compound heterozygous or homozygous lines; and breeding to place the transgene on a distinct background that is appropriate for an experimental model of interest.

[0486] Transgenic animals of the invention have uses which include, but are not limited to, animal model systems useful in elaborating the biological function of polypeptides of the present invention, studying conditions and/or disorders associated with aberrant expression, and in screening for compounds effective in ameliorating such conditions and/or disorders.

### Example 14

### Knock-Out Animals

[0487] Endogenous gene expression can also be reduced by inactivating or “knocking out” the gene and/or its promoter using targeted homologous recombination. (E. g., see Smithies et al., Nature 317: 230-234 (1985); Thomas & Capecchi, Cell 51: 503512 (1987); Thompson et al., Cell 5: 313-321 (1989)) Alternatively, RNAI technology may be used. For example, a mutant, non-functional polynucleotide of the invention (or a completely unrelated DNA sequence) flanked by DNA homologous to the endogenous polynucleotide sequence (either the coding regions or regulatory regions of the gene) can be used, with or without a selectable marker and/or a negative selectable marker, to transfect cells that express polypeptides of the invention in vivo. In another embodiment, techniques known in the art are used to generate knockouts in cells that contain, but do not express the gene of interest. Insertion of the DNA construct, via targeted homologous recombination, results in inactivation of the targeted gene. Such approaches are particularly suited in research and agricultural fields where modifications to embryonic stem cells can be used to generate animal offspring with an inactive targeted gene (e.g., see Thomas & Capecchi 1987 and Thompson 1989, supra). However, this approach can be routinely adapted for use in humans provided the recombinant DNA constructs are directly administered or targeted to the required site in vivo using appropriate viral vectors that will be apparent to those of skill in the art.

[0488] In further embodiments of the invention, cells that are genetically engineered to express the polypeptides of the invention, or alternatively, that are genetically engineered not to express the polypeptides of the invention (e.g., knockouts) are administered to a patient in vivo. Such cells may be obtained from the patient (i.e., animal, including human) or an MHC compatible donor and can include, but are not limited to fibroblasts, bone marrow cells, blood cells (e.g., lymphocytes), adipocytes, muscle cells, endothelial cells etc. The cells are genetically engineered in vitro using recombinant DNA techniques to introduce the coding sequence of polypeptides of the invention into the cells, or alternatively, to disrupt the coding sequence and/or endogenous regulatory sequence associated with the polypeptides of the invention, e.g., by transduction (using viral vectors, and preferably vectors that integrate the transgene into the cell genome) or transfection procedures, including, but not limited to, the use of plasmids, cosmids, YACs, naked DNA, electroporation, liposomes, etc.

[0489] The coding sequence of the polypeptides of the invention can be placed under the control of a strong constitutive or inducible promoter or promoter/enhancer to achieve expression, and preferably secretion, of the polypeptides of the invention. The engineered cells which express and preferably secrete the polypeptides of the invention can be introduced into the patient systemically, e.g., in the circulation, or intraperitoneally.

[0490] Alternatively, the cells can be incorporated into a matrix and implanted in the body, e.g., genetically engineered fibroblasts can be implanted as part of a skin graft; genetically engineered endothelial cells can be implanted as part of a lymphatic or vascular graft. (See, for example, Anderson et al. U.S. Pat. No. 5,399,349; and Mulligan & Wilson, U.S. Pat. No. 5,460,959, the contents of which are hereby incorporated by reference herein in their entirety).

[0491] When the cells to be administered are non-autologous or non-MHC compatible cells, they can be administered using well known techniques which prevent the development of a host immune response against the introduced cells. For example, the cells may be introduced in an encapsulated form which, while allowing for an exchange of components with the immediate extracellular environment, does not allow the introduced cells to be recognized by the host immune system.

[0492] Transgenic and “knock-out” animals of the invention have uses which include, but are not limited to, animal model systems useful in elaborating the biological function of polypeptides of the present invention, studying conditions and/or disorders associated with aberrant expression, and in screening for compounds effective in ameliorating such conditions and/or disorders.

[0493] While preferred illustrative embodiments of the present invention are described, one skilled in the art will appreciate that the present invention can be practiced by other than the described embodiments, which are presented for purposes of illustration only and not by way of limitation. The present invention is limited only by the claims that follow.

1. An isolated nucleic acid molecule comprising:
(a) a nucleic acid molecule comprising a nucleic acid sequence that encodes an amino acid sequence of SEQ ID NO: 410-611;
(b) a nucleic acid molecule comprising a nucleic acid sequence of SEQ ID NO: 1-409;
(c) a nucleic acid molecule that selectively hybridizes to the nucleic acid molecule of (a) or (b); or
(d) a nucleic acid molecule having at least 95% sequence identity to the nucleic acid molecule of (a) or (b).

2. The nucleic acid molecule according to claim 1, wherein the nucleic acid molecule is a cDNA.

3. The nucleic acid molecule according to claim 1, wherein the nucleic acid molecule is genomic DNA.

4. The nucleic acid molecule according to claim 1, wherein the nucleic acid molecule is an RNA.

5. The nucleic acid molecule according to claim 1, wherein the nucleic acid molecule is a mammalian nucleic acid molecule.

6. The nucleic acid molecule according to claim 5, wherein the nucleic acid molecule is a human nucleic acid molecule.

7. A method for determining the presence of a hepatic specific nucleic acid (HSNA) in a sample, comprising the steps of:
(a) contacting the sample with the nucleic acid molecule of SEQ ID NO: 1-409 under conditions in which the nucleic acid molecule will selectively hybridize to a hepatic specific nucleic acid; and
(b) detecting hybridization of the nucleic acid molecule to a HSNA in the sample, wherein the detection of the hybridization indicates the presence of a HSNA in the sample.

8. A vector comprising the nucleic acid molecule of claim 1.

9. A host cell comprising the vector according to claim 8.

10. A method for producing a polypeptide encoded by the nucleic acid molecule according to claim 1, comprising the steps of:
(a) providing a host cell comprising the nucleic acid molecule operably linked to one or more expression control sequences, and
(b) incubating the host cell under conditions in which the polypeptide is produced.

11. A polypeptide encoded by the nucleic acid molecule according to claim 1.

12. An isolated polypeptide selected from the group consisting of:
(a) a polypeptide comprising an amino acid sequence with at least 95% sequence identity to of SEQ ID NO: 410-611; or
(b) a polypeptide comprising an amino acid sequence encoded by a nucleic acid molecule having at least 95% sequence identity to a nucleic acid molecule comprising a nucleic acid sequence of SEQ ID NO: 1-409.

13. An antibody or fragment thereof that specifically binds to:
(a) a polypeptide comprising an amino acid sequence with at least 95% sequence identity to of SEQ ID NO: 410-611; or
(b) a polypeptide comprising an amino acid sequence encoded by a nucleic acid molecule having at least 95% sequence identity to a nucleic acid molecule comprising a nucleic acid sequence of SEQ ID NO: 1-409.

14. A method for determining the presence of a hepatic specific protein in a sample, comprising the steps of:
(a) contacting the sample with a suitable reagent under conditions in which the reagent will selectively interact with the hepatic specific protein comprising an amino acid sequence with at least 95% sequence identity to of SEQ ID NO: 410-611; and
(b) detecting the interaction of the reagent with a hepatic specific protein in the sample, wherein the detection of binding indicates the presence of a hepatic specific protein in the sample.

15. A method for diagnosing or monitoring the presence and metastases of hepatic cancer in a patient, comprising the steps of:
(a) determining an amount of:
(i) a nucleic acid molecule comprising a nucleic acid sequence that encodes an amino acid sequence of SEQ ID NO: 410-611;
(ii) a nucleic acid molecule comprising a nucleic acid sequence of SEQ ID NO: 1-409;
(iii) a nucleic acid molecule that selectively hybridizes to the nucleic acid molecule of (i) or (ii);
(iv) a nucleic acid molecule having at least 95% sequence identity to the nucleic acid molecule of (i) or (ii);
(v) a polypeptide comprising an amino acid sequence with at least 95% sequence identity to of SEQ ID NO: 410-611; or
(vi) a polypeptide comprising an amino acid sequence encoded by a nucleic acid molecule having at least 95% sequence identity to a nucleic acid molecule comprising a nucleic acid sequence of SEQ ID NO: 1-409 and;
(b) comparing the amount of the determined nucleic acid molecule or the polypeptide in the sample of the patient to the amount of the hepatic specific marker in a normal control; wherein a difference in the amount of the nucleic acid molecule or the polypeptide in the sample compared to the amount of the nucleic acid molecule or the polypeptide in the normal control is associated with the presence of hepatic cancer.

16. A kit for detecting a risk of cancer or presence of cancer in a patient, said kit comprising a means for determining the presence of:
(a) a nucleic acid molecule comprising a nucleic acid sequence that encodes an amino acid sequence of SEQ ID NO: 410-611;
(b) a nucleic acid molecule comprising a nucleic acid sequence of SEQ ID NO: 1-409;
(c) a nucleic acid molecule that selectively hybridizes to the nucleic acid molecule of (a) or (b); or
(d) a nucleic acid molecule having at least 95% sequence identity to the nucleic acid molecule of (a) or (b); or
(e) a polypeptide comprising an amino acid sequence with at least 95% sequence identity to of SEQ ID NO: 410-611; or
(f) a polypeptide comprising an amino acid sequence encoded by a nucleic acid molecule having at least 95% sequence identity to a nucleic acid molecule comprising a nucleic acid sequence of SEQ ID NO: 1-409.

17. A method of treating a patient with hepatic cancer, comprising the step of administering a composition consisting of:
(a) a nucleic acid molecule comprising a nucleic acid sequence that encodes an amino acid sequence of SEQ ID NO: 410-611;
(b) a nucleic acid molecule comprising a nucleic acid sequence of SEQ ID NO: 1-409;
(c) a nucleic acid molecule that selectively hybridizes to the nucleic acid molecule of (a) or (b);
(d) a nucleic acid molecule having at least 95% sequence identity to the nucleic acid molecule of (a) or (b);
(e) a polypeptide comprising an amino acid sequence with at least 95% sequence identity to of SEQ ID NO: 410-611; or
(f) a polypeptide comprising an amino acid sequence encoded by a nucleic acid molecule having at least 95% sequence identity to a nucleic acid molecule comprising a nucleic acid sequence of SEQ ID NO: 1-409;
to a patient in need thereof, wherein said administration induces an immune response against the hepatic cancer cell expressing the nucleic acid molecule or polypeptide.

18. A vaccine comprising the polypeptide or the nucleic acid encoding the polypeptide of claim 12.

The application's sequence listing, which the Patent Office published only in electronic form, follows.

SEQUENCE LISTING (611 sequences)

SEQ ID NO: 1 - DNA, 595 bp, Homo sapien
  misc_feature (342)..(342): n=a,c,g or t
ctcataccgaactagagtattcatattcccactgacgagtggaaaggcctcataatacacagagatccagtagaagcctcagaagggccttgcctcagtaatgggacaggttagccttagactaaaggctgctctggacatgccataacagaacttaaaaagtaagcctgaaatgaatttaagtgtatcccactacaaagcctgacaatatttaaaggaatacaacaaaatccagatcccaacagtgtaacattaataatgttgaatattcattaaagcatcatcacacatacaaaagctgaaaaattcaacccagaaataggagaaaatgtaaccaatagnaaaggggttagaaatgaaagggatgatagaattggttaacaagttcattcaaacaactactattagtatacttcgtttgttcaaggaggtaaaaaaacatgaacacaagaggattcataaaggactcagattcaacttctaatgatgaaaatgcaatatctgaaatgaaaatactctgaatgggattaacagatactacagaagtaaagaaaagtcaatttgaagacacagaatttaaaaatacacaatataa

SEQ ID NO: 2 - DNA, 600 bp, Homo sapien
ctcatacagaactaggagtagttcatattcccactggacagagtggaaaggcctcataatacacagagatcctgtagaagcctcagaagggccttgcctcagtaatgggacaggttagccttagactaaaggctgctctggacatgccataacagaacttaaaaagtaagcctgaaatgaatttaagtgtatcccactacaaagcctgacaatatttaaaggaatacaacaaaatccagatcccaacagtgtaacattaataatgttgaatattcattagagcatcatcacacatacaaaagctggaaaattcaacccagaaataggagaaaatgtaaccaatagaaaaggggttagaaatgaaagggatgatagaattggttaacaagttcattcaaacaactactattagtatacttcgtttgttcaaggaggtaaaaaaaacatgaacacaagaggattcataaaggactcagattcaacttctagtgatgaaaatgcaatatctgaaatgaaaatactctgaatgggattaacagatactacagaagtaaagaaaagtcaatttgaagacacagaatttaaaaatacacaatataa

SEQ ID NO: 3 - DNA, 671 bp, Homo sapien
ggccttccgggggcacaatcaccaaagtgcttgcatggaaaccacccttcatgcctggagtgactggtggagatgacagggacagttgttagggaataagaaatgctgtggggaacactgaaggaggaccagctgatgttggattccacacagcgtggattctcctgaacagcatcctgtccagttgtgctctttttgcagctgaagttattttgttggaacttagacatggagaaggcagacagctttattgatccaggcttggactttttgccggactagcaatgaccagaaaattgacaaaagaattggggtggggcagtgtttgaggaaagctggctgagtttttaaatacaccatggagtccagctgaaagaggaagagagcaaagaacagtagagtttgctcaatgagcagaaagggtgatggagacagggacagtggtgaccgagtactctgcaggtgcaagaattttactagttatgtactgaaagtgctggaaggggaggaggctgaatcagaatagaagacagaaaaataaaggtcagttttagaaggatgccaatgagaatgtgtggctgttttgatgtcctggaagcactgtgtgtgcagggagactgaagatgccccaagtgtcagcagcttcctgagcagtgagagaccagggtgca

SEQ ID NO: 4 - DNA, 674 bp, Homo sapien
gggcttgcggggggcactatcagcaaagtggcttgcatggaagccacccttcagtggctggagtgactggtggagatgacagggacagttgttagggaataagaaatgctgtggggaacactgaaggaggaccagctgatgttggattccacacagcgtggattctcctgaacagcatcctgtccagttgtgctctttttgcagctgaagttattttgttggaacttagacatggagaaggcagacagctttattgatccaggcttggactttttgccggactagcaatgaccagaaaattgacaaaagaattggggtggggcagtgtttgaggaaagctggctgagtttttaaatacaccatggagtccagctgaaagaggaagagagcaaagaacagtagagtttgctcaatgagcagaaagggtgatggagacagggacagtggtgaccgagtactctgcaggtgcaagaattttactagttatgtactgaaagtgctggaaggggaggaggctgaatcagaatagaagacagaaaaataaaggtcagttttagaaggatgccaatgagaatgtgtggctgttttgatgtcctggaagcactgtgtgtgcagggagactgaagatgccccaagtgtcagcagcttcctgagcagtgagagaccagggtgca

SEQ ID NO: 5 - DNA, 584 bp, Homo sapien
ctaccaacggcaactgaactttcaaactttaactttaattttaactcaactttaacacttaacatagacacatagagcaagtggctgctgtcttggataactcagatgaggcttcaaactgcaaactcttttgtggtttgagactagcatgttcttaagcattctcatgtgcagaagaaaatgggtaatggttctgtctgaaatcttgaatggtattttaaagtgtgtaagtgaatttccaagtacagaattgattcatggataccttttaataataaattattttaagcagcataaatgcttatcattagtcagactatctttctctaaacattctccttattcagttgtattacagtgttctatttatctgtgaatggcagtcccactcaactataaactatctgtatcttaacacccagaacaaatctaggcactcagttggcttctcagtggttttttgtttgaatcccgtgtcctctgatgtatttgcactattttgctttattatttaacttcttacttatgttttttgtctctgcagtagtatcactgcaggagagtgaagagttggtaagaaagtt

SEQ ID NO: 6 - DNA, 3280 bp, Homo sapien
ttgctgtcaggtgactctcccgtggcgccatggcggaagcagaggagcaggaaactgggtcccttgaagaatctacagatgagtctgaggaagaagagagcgaagaggaacccaagctgaagtatgaaaggctttccaatggggtaactgaaatacttcagaaggatgcagctagctgcatgacagtccatgacaagtttttggcattgggcacacattatggcaaggtttatttacttgatgtccaggggaacatcactcagaagtttgatgtaagtcctgtgaagataaatcagattagcttggatgaaagtggagagcacatgggtgtgtgttcagaggatggcaaggtgcaggtatttggactgtattctggagaagaatttcacgagacttttgactgtcccattaaaattattgctgtgcacccacatttcgtgagatccagttgcaagcagtttgtgaccggagggaagaagctgctactgtttgaacggtcttggatgaacagatggaagtctgctgttctgcatgaaggggaagggaacataaggagtgtgaagtggagaggccatctgattgcttgggccaataatatgggtgtgaagatttttgacatcatctcaaagcaaagaatcaccaatgtgccccgggatgatataagtcttcgcccagacatgtatccctgcagcctctgctggaaggacaatgtgacactgattattggctgggggacttctgtcaaggtgtgctcagtgaaggaacggcatgccagtgaaatgagggatttgccaagtcgatatgttgaaatagtgtctcagtttgaaactgaattctacatcagtggacttgcacctctctgtgatcagcttgttgtactttcgtatgtaaaggagatttcagaaaaaacggaaagagaatactgtgccaggcctagactggacatcatccagccactttctgagacttgtgaagagatctcttctgatgctttgacagtcagaggctttcaggagaatgaatgtagagattatcatttagaatactctgaaggggaatcacttttttacatcgtgagtccgagagatgttgtagtggccaaggaacgagaccaagatgatcacattgactggctccttgaaaagaagaaatatgaagaagcattgatggcagctgaaattagccaaaaaaatattaaaagacataagattctggatattggcttggcatatataaatcacctggtggagagaggagactatgacatagcagcacgcaaatgccagaaaattcttgggaaaaatgcagcactctgggaatatgaagtttataaatttaaagaaattggacagcttaaggctattagtccttatttgccaagaggtgatccagttctgaaaccactcatctatgaaatgatcttacatgaatttttggagagtgattatgagggttttgccacattgatccgagaatggcctggagatctgtataataattcagtcatagttcaagcagttcgggatcatttgaagaaagatagtcagaacaagactttacttaaaaccctggcagaattgtacacctatgacaagaactatggcaatgctctggaaatatacttaacattaagacataaagacgtttttcagttgatccacaagcataatcttttcagttctatcaaggataaaattgttttattaatggattttgattcagagaaagctgttgacatgcttttggacaatgaagataaaatttcaattaaaaaggtagtggaagaattggaagacagaccagagctacagcatgtgtatttgcataagcttttcaagagagaccaccataaggggcagcgttaccatgaaaaacagatcagtctttatgctgaatatgatcgaccaaacttacttccctttctccgagacagtacccattgcccacttgaaaaggctcttgagatctgtcaacagagaaactttgtagaagagacagtttatcttctgagccgaatgggtaatagccgaagtgccctgaagatgattatggaggaattacatgatgttgataaagcaatcgaatttgccaaggagcaagatgatggagagctgtgggaagatttgattttatattccattgacaaaccaccatttattactggcttgttaaacaacattggcacacatgttgacccaattctactgattcaccgtattaaggaaggaatggagatccccaatttgagagattccttggttaaaattctgcaagactacaatttgcaaattctgcttcgtgaaggctgcaagaagattctcgtagctgactctttgtccttactgaagaaaatgcaccgaactcaaatgaaaggtgttcttgttgatgaggagaacatctgtgagtcgtgcctttcccctattcttccatcagatgcagctaagcccttcagcgtggtggtcttccattgccggcacatgttccacaaggagtgcctgcccatgcccagcatgaactctgctgcacagttctgcaacatctgcagtgctaagaaccgtggaccaggaagtgcaattttggagatgaaaaaatagctcatttctccttgtcagtctccttgtcaccactctttttgagactgtttttgcaacaacaaaagcatttgttgacactcgtgctgttaagagatttgtttatgtttatattatactcaaaaacaatttcttcatctattcctgtactaatggtttctctttgcagttcacagagaatttggggctctcttcatgccttgaaattttggggtccatagtgaatattttgttatttatttgtttggctcattctttatatagtaatggaaacataagtctaggagttagaaatgaattttttagaccttagtaaaaccatttaaccataaaatggacaactgagaattctcccagctgcctgaaagcgtcgccaactgtggttatcctgcaagctgctacctgcaacttggacgttgtttccacgtgctctgctggctacgattcttgcattctgggtttggcttttttctgtgtcatcaactatggttatcctctaaataggcatttaatgaaacattgtacaaattgtcactcatttgatgacacctgggaataacattagcaggctgatgtcctgcaccattatgtttactaatcacatgttctgtgtgctgtgacgactgtcaaagagtatctggccatggcggacactcagcatttgttgattgaataaatgttagctcttc

SEQ ID NO: 7 - DNA, 1527 bp, Homo sapien
gcatttgtttatttctagttcttggcagatagatatatgtcttcatctgtaatgaaaagcaccttcttaaggtttattatgacagaagaaatttgcataattcaaaagcggaaactaacaaagcattgttaggatgctaacaaatgcttttcaaatataagttcagcataacaaagtactaaaagacctagttgacctcatgtttacttaggattaaaggattatttcatggggcagtccatgagaagttgttctacttaggttcttttctagaggaattagatttggatgtttaagtgcttctgttgaaaactgcatgggctcaggtgaagaagtgagcttccatagcatttcagacagtgttgcagcaaaaaggaaccacatacattcccactctacagttagatttaactccaaatttactctgctgatgacactaaatcttaccaaaaataagctggccacacagagcaggaacagatgaggggatctgcccaagcacaagtgcagtaaaatgcaaggtcaccacagcctgggcttgtaacccaggtccgcctctgagtcagtgtgtggtcttggcaaaggtagcaggtggactggcaaagcatttttatgaagccacagactcaacttcagctgtggtgtataatgattataggggttaggggcgcattggcacatacacttgctggttttcctacagttgtcctcaatgtagtctgggtaagtgacacagaggctaagcaagtaacctgtgaatcgcatagcaacatgattataatacctgttttgtgtctgatcataccacccctcaggaatgcttttgtaaataagccattctctaaaggcaccttattgctgaaaattaaactgcaactcgactttcagtcgggattggtttaaaatgatcttgcttgttgcattaagttctcctcctttctctgccctcctcgccagatgcagctaagcccttcagcgtggtggtcttccattgccggcacatgttccacaaggagtgcctgcccatgcccagcatggtgagttggcagcttggcacctatcaactagagggaaattaacacacttagaggaatgtgctttaaactgtaacccttcatccttatggctgtatgggttaaaaaaaaattacaatgtggatttatatcacataacaaaaattaatctagttttcaaatgtaaaaatatttagaaatgttctatgtactatagtaaacataaaagcatacccatttgaaggaattcattcaggcccagttgacagctgtcatgctgtagagatgagcaacaacagtagagagccattgtgtatcttatgtgtttctcagcctgatttgtgttccatgatgctatcatttttttagtgtcatattcctccaggtcacattagacgtattctgctgttgggtgtccttggagtcacagagtaacagctgatctagactaaatcctatgttaaccagaaataaactccagagaaaggagtgccatcctattacttcctctcca

SEQ ID NO: 8 - DNA, 6048 bp, Homo sapien
ttgctgtcaggtgactctcccgtggcgccatggcggaagcagaggagcaggaaactgggtcccttgaagaatctacagatgagtctgaggaagaagagagcgaagaggaacccaagctgaagtatgaaaggctttccaatggggtaactgaaatacttcagaaggatgcagctagctgcatgacagtccatgacaagtttttggcattgggcacacattatggcaaggtttatttacttgatgtccaggggaacatcactcagaagtttgatgtaagtcctgtgaagataaatcagattagcttggatgaaagtggagagcacatgggtgtgtgttcagaggatggcaaggtgcaggtatttggactgtattctggagaagaatttcacgagacttttgactgtcccattaaaattattgctgtgcacccacatttcgtgagatccagttgcaagcagtttgtgaccggagggaagaagctgctactgtttgaacggtcttggatgaacagatggaagtctgctgttctgcatgaaggggaagggaacataaggagtgtgaagtggagaggccatctgattgcttgggccaataatatgggtgtgaagatttttgacatcatctcaaagcaaagaatcaccaatgtgccccgggatgatataagtcttcgcccagacatgtatccctgcagcctctgctggaaggacaatgtgacactgattattggctgggggacttctgtcaaggtgtgctcagtgaaggaacggcatgccagtgaaatgagggatttgccaagtcgatatgttgaaatagtgtctcagtttgaaactgaattctacatcagtggacttgcacctctctgtgatcagcttgttgtactttcgtatgtaaaggagatttcagaaaaaacggaaagagaatactgtgccaggcctagactggacatcatccagccactttctgagacttgtgaagagatctcttctgatgctttgacagtcagaggctttcaggagaatgaatgtagagattatcatttagaatactctgaaggggaatcacttttttacatcgtgagtccgagagatgttgtagtggccaaggaacgagaccaagatgatcacattgactggctccttgaaaagaagaaatatgaagaagcattgatggcagctgaaattagccaaaaaaatattaaaagacataagattctggatattggcttggcatatataaatcacctggtggagagaggagactatgacatagcagcacgcaaatgccagaaaattcttgggaaaaatgcagcactctgggaatatgaagtttataaatttaaagaaattggacagcttaaggctattagtccttatttgccaagaggtgatccagttctgaaaccactcatctatgaaatgatcttacatgaatttttggagagtgattatgagggttttgccacattgatccgagaatggcctggagatctgtataataattcagtcatagttcaagcagttcgggatcatttgaagaaagatagtcagaacaagactttacttaaaaccctggcagaattgtacacctatgacaagaactatggcaatgctctggaaatatacttaacattaagacataaagacgtttttcagttgatccacaagcataatcttttcagttctatcaaggataaaattgttttattaatggattttgattcagagaaagctgttgacatgcttttggacaatgaagataaaatttcaattaaaaaggtagtggaagaattggaagacagaccagagctacagcatgtgtatttgcataagcttttcaagagagaccaccataaggggcagcgttaccatgaaaaacagatcagtctttatgctgaatatgatcgaccaaacttacttccctttctccgagacagtacccattgcccacttgaaaaggctcttgagatctgtcaacagagaaactttgtagaagagacagtttatcttctgagccgaatgggtaatagccgaagtgccctgaagatgattatggaggaattacatgatgttgataaagcaatcgaatttgccaaggagcaagatgatggagagctgtgggaagatttgattttatattccattgacaaaccaccatttattactggcttgttaaacaacattggcacacatgttgacccaattctactgattcaccgtattaaggaaggaatggagatccccaatttgagagattccttggttaaaattctgcaagactacaatttgcaaattctgcttcgtgaaggctgcaagaagattctcgtagctgactctttgtccttactgaagaaaatgcaccgaactcaaatgaaaggtgttcttgttgatgaggagaacatctgtgagtcgtgcctttcccctattcttccatcagatgcagctaagcccttcagcgtggtggtcttccattgccggcacatgttccacaaggagtgcctgcccatgcccagcatgaactctgctgcacagttctgcaacatctgcagtgctaagaaccgtggaccaggaagtgcaattttggagatgaaaaaatagctcatttctccttgtcagtctccttgtcaccactctttttgagactgtttttgcaacaacaaaagcatttgttgacactcgtgctgttaagagatttgtttatgtttatattatactcaaaaacaatttcttcatctattcctgtactaatggtttctctttgcagttcacagagaatttggggctctcttcatgccttgaaattttggggtccatagtgaatattttgttatttatttgtttggctcattctttatatagtaatggaaacataagtctaggagttagaaatgaattttttagaccttagtaaaaccatttaaccataaaatggacaactgagaattctcccagctgcctgaaagcgtcgccaactgtggttatcctgcaagctgctacctgcaacttggacgttgtttccacgtgctctgctggctacgattcttgcattctgggtttggcttttttctgtgtcatcaactatggttatcctctaaataggcatttaatgaaacattgtacaaattgtcactcatttgatgacacctgggaataacattagcaggctgatgtcctgcaccattatgtttactaatcacatgttctgtgtgctgtgacgactgtcaaagagtatctggccatggcggacactcagcatttgttgattgaataaatgttagctcttctcattgtgaaggactcacttttactgggataaacaaatgcagttaagaattctggcacccttgtaaggaagaaaagagagttcaacaccttcgagtctgagcgcttgtggctagagtttgccaggagggaggaaaccagtgaccctgaaaactgagggtgcctcaggagcagtgggaccacctgatgctgaaggacggactaatgatgtttcctcttgccttctctggtgcctccattgccctcatggaacagagcatatcatagagggagaaaagtcaaacttgtaattgtgtcttacagttactggcttcatcttccttgggatatatggtcatcctctaatgagtgtaaaagtgcgcaaaacacatccttattgttcctgatctcttagtcccataaatgggaacaaatacagctttctgcttctttctttttggggaaaggacagggtgctagtgagtactgacagcatgccagctaccgaagtcacccagccattcccatgagcagcagttcatttaattgtcacagcgtcgccaggaagaagatctgataaacctaggtttacagataaagaaagcaaaatgtagagatgttgttgaggtcacagaggtgactgcctaacttcagagcagggcttctgatccctttaagaaattacagggccagccgggcatggtggctcacgcccgtaatcccagggctttgggaggccttggcaggtggatcacctgagatcgcacgttcgagaccagcctgaccaacatggagaaaccccatctctactaaaaacacaaattggccaggcatggtggtgcatgcctgtaatcccagctactcaggaggctgaggcaggagaatcacttgaccccaggagacgtaggttgtggtgagctgagatcgcgccattgcactccagcctgggcaacaagagcaaaactccgtctcaaaaaagaaaagaaaagaaaagaaatcatagggccaagttcaaaggaaatgcacagaacatatcttcacattagagttaagaattctctagcaaacaacagatttttttgttgttgttagtcacaaatacttagaactggaaggctctttgttattattgaatgtacccctcagccttctcagcatttccttatcccaagactagtgtgctttctgctacactgctagttttcagttttgttcttacccaattgttttttcttttcaacattaccaatttacagattcagtttattacatttacattaatcctcacttatgatttgagcaagctcatttccagaaaagtttactttaagatcatcaataggatttgctaatttcagtgaagtcattttgcttcaggggtaaattatcctagttaccaagtcctatttggacataaagaaaatcctacttatagaaaaggagaaaataattaaacagtcttcatttttaagtaactgatttaaaaggaaaataataaaatatgttcgtttatcatttcagaaattgctgtaacacactggaaaattcctgaacaatatagattttatcgttaataaaaaacactagctttcgttccttagaatgtcttttcttttgaataaacagtattgggtgatttattaaaggatattcaatcctttttacttttcatcaacctataagggcttaaatatggcaaaataatccaagtgttagtcaattatttttcatgtgtgactagcccaatttaaaatataggtaaaaaggaaacccattcccctcgttttggggaagaacatagttgcaaagtacacacttcataagctattctttttttttttttttttttttttttttttgagatggagtctcgttctgttgccttggctggagtgcagtgacatgatcttggctcactgcaacctccgcctcccaggttcaagtgattctcccgtctcagcttccggagtgggtgggagtgcaggcacgcaccaccatgcccagctaattttttgtactttggtagagatggggtttcaccatgttgcccaagctggtctcgaactcctgagctcaggaatccgcccacctcggccttccgaagtgttgggattacgggcgtaagtcaccatgcccagccaagaaagctattcttgaagtgtaaaacagccaggtgcaaaattattttggagtactttagtttgcttttgtttttagccaaagggatttcatactggtttaattatgttcatccttgagaatttttgagaagtttccaacagatttgtagttcattttgctgttgttacaatgtaaagctatatatagttgacccttgaacaacacaggttggaactgcaaggatccacttatacatggattttcttctgcctctgccacccttgagacggcaagaccaggccctccccttcctcctccttctcagcctactcagtatgaagacgacagagatgaaacacttatgatgatccacttctacttaatgagtagtaaatatattttcttttccttatgattttcttactattttctttagcttgctttattataagaatatagcatataatataaataaaatataaaatatgtgttaatggtctatttatgtcaccagtaaggcttccagtccacagtagtctattagtagttaggttttgggggaattatacgtggatttttgactgcatggggtgtcagcacctcatcccccacattgttcaaggttctactgtattttaatattaaaaaccaaacatgcattgagtaatta

SEQ ID NO: 9 - DNA, 4857 bp, Homo sapien
ttgctgtcaggtgactctcccgtggcgccatggcggaagcagaggagcaggaaactgggtcccttgaagaatctacagatgagtctgaggaagaagagagcgaagaggaacccaagctgaagtatgaaaggctttccaatggggtaactgaaatacttcagaaggatgcagctagctgcatgacagtccatgacaagtttttggcattgggcacacattatggcaaggtttatttacttgatgtccaggggaacatcactcagaagtttgatgtaagtcctgtgaagataaatcagattagcttggatgaaagtggagagcacatgggtgtgtgttcagaggatggcaaggtgcaggtatttggactgtattctggagaagaatttcacgagacttttgactgtcccattaaaattattgctgtgcacccacatttcgtgagatccagttgcaagcagtttgtgaccggagggaagaagctgctactgtttgaacggtcttggatgaacagatggaagtctgctgttctgcatgaaggggaagggaacataaggagtgtgaagtggagaggccatctgattgcttgggccaataatatgggtgtgaagatttttgacatcatctcaaagcaaagaatcaccaatgtgccccgggatgatataagtcttcgcccagacatgtatccctgcagcctctgctggaaggacaatgtgacactgattattggctgggggacttctgtcaaggtgtgctcagtgaaggaacggcatgccagtgaaatgagggatttgccaagtcgatatgttgaaatagtgtctcagtttgaaactgaattctacatcagtggacttgcacctctctgtgatcagcttgttgtactttcgtatgtaaaggagatttcagaaaaaacggaaagagaatactgtgccaggcctagactggacatcatccagccactttctgagacttgtgaagagatctcttctgatgctttgacagtcagaggctttcaggagaatgaatgtagagattatcatttagaatactctgaaggggaatcacttttttacatcgtgagtccgagagatgttgtagtggccaaggaacgagaccaagatgatcacattgactggctccttgaaaagaagaaatatgaagaagcattgatggcagctgaaattagccaaaaaaatattaaaagacataagattctggatattggcttggcatatataaatcacctggtggagagaggagactatgacatagcagcacgcaaatgccagaaaattcttgggaaaaatgcagcactctgggaatatgaagtttataaatttaaagaaattggacagcttaaggctattagtccttatttgccaagaggtgatccagttctgaaaccactcatctatgaaatgatcttacatgaatttttggagagtgattatgagggttttgccacattgatccgagaatggcctggagatctgtataataattcagtcatagttcaagcagttcgggatcatttgaagaaagatagtcagaacaagactttacttaaaaccctggcagaattgtacacctatgacaagaactatggcaatgctctggaaatatacttaacattaagacataaagacgtttttcagttgatccacaagcataatcttttcagttctatcaaggataaaattgttttattaatggattttgattcagagaaagctgttgacatgcttttggacaatgaagataaaatttcaattaaaaaggtagtggaagaattggaagacagaccagagctacagcatgtgtatttgcataagcttttcaagagagaccaccataaggggcagcgttaccatgaaaaacagatcagtctttatgctgaatatgatcgaccaaacttacttccctttctccgagacagtacccattgcccacttgaaaaggctcttgagatctgtcaacagagaaactttgtagaagagacagtttatcttctgagccgaatgggtaatagccgaagtgccctgaagatgattatggaggaattacatgatgttgataaagcaatcgaatttgccaaggagcaagatgatggagagctgtgggaagatttgattttatattccattgacaaaccaccatttattactggcttgttaaacaacattggcacacatgttgacccaattctactgattcaccgtattaaggaaggaatggagatccccaatttgagagattccttggttaaaattctgcaagactacaatttgcaaattctgcttcgtgaaggctgcaagaagattctcgtagctgactctttgtccttactgaagaaaatgcaccgaactcaaatgaaaggtgttcttgttgatgaggagaacatctgtgagtcgtgcctttcccctattcttccatcagatgcagctaagcccttcagcgtggtggtcttccattgccggcacatgttccacaaggagtgcctgcccatgcccagcatgaactctgctgcacagttctgcaacatctgcagtgctaagaaccgtggaccaggaagtgcaattttggagatgaaaaaatagctcatttctccttgtcagtctccttgtcaccactctttttgagactgtttttgcaacaacaaaagcatttgttgacactcgtgctgttaagagatttgtttatgtttatattatactcaaaaacaatttcttcatctattcctgtactaatggtttctctttgcagttcacagagaatttggggctctcttcatgccttgaaattttggggtccatagtgaatattttgttatttatttgtttggctcattctttatatagtaatggaaacataagtctaggagttagaaatgaattttttagaccttagtaaaaccatttaaccataaaatggacaactgagaattctcccagctgcctgaaagcgtcgccaactgtggttatcctgcaagctgctacctgcaacttggacgttgtttccacgtgctctgctggctacgattcttgcattctgggtttggcttttttctgtgtcatcaactatggttatcctctaaataggcatttaatgaaacattgtacaaattgtcactcatttgatgacacctgggaataacattagcaggctgatgtcctgcaccattatgtttactaatcacatgttctgtgtgctgtgacgactgtcaaagagtatctggccatggcggacactcagcatttgttgattgaataaatgttagctcttctcattgtgaaggactcacttttactgggataaacaaatgcagttaagaattctggcacccttgtaaggaagaaaagagagttcaacaccttcgagtctgagcgcttgtggctagagtttgccaggagggaggaaaccagtgaccctgaaaactgagggtgcctcaggagcagtgggaccacctgatgctgaaggacggactaatgatgtttcctcttgccttctctggtgcctccattgccctcatggaacagagcatatcatagagggagaaaagtcaaacttgtaattgtgtcttacagttactggcttcatcttccttgggatatatggtcatcctctaatgagtgtaaaagtgcgcaaaacacatccttattgttcctgatctcttagtcccataaatgggaacaaatacagctttctgcttctttctttttggggaaaggacagggtgctagtgagtactgacagcatgccagctaccgaagtcacccagccattcccatgagcagcagttcatttaattgtcacagcgtcgccaggaagaagatctgataaacctaggtttacagataaagaaagcaaaatgtagagatgttgttgaggtcacagaggtgactgcctaacttcagagcagggcttctgatccctttaagaaattacagggccagccgggcatggtggctcacgcccgtaatcccagggctttgggaggccttggcaggtggatcacctgagatcgcacgttcgagaccagcctgaccaacatggagaaaccccatctctactaaaaacacaaattggccaggcatggtggtgcatgcctgtaatcccagctactcaggaggctgaggcaggagaatcacttgaccccaggagacgtaggttgtggtgagctgagatcgcgccattgcactccagcctgggcaacaagagcaaaactccgtctcaaaaaagaaaagaaaagaaaagaaatcatagggccaagttcaaaggaaatgcacagaacatatcttcacattagagttaagaattctctagcaaacaacagatttttttgttgttgttagtcacaaatacttagaactggaaggctctttgttattattgaatgtacccctcagccttctcagcatttccttatcccaagactagtgtgctttctgctacactgctagttttcagttttgttcttacccaattgttttttcttttcaacattaccaatttacagattcagtttattacatttacattaatcctcacttatgatttgagcaagctcatttccagaaaagtttactttaagatcatcaataggatttgctaatttcagtgaagtcattttgcttcaggggtaaattatcctagttaccaagtcctatttggacataaagaaaatcctacttatagaaaaggagaaaataattaaacagtcttcatttttaagtaactgatttaaaaggaaaataataaaatatgttcgtttatcatttcagaaattgctgtaacacactggaaaattcctgaacaatatagattttatcgttaataaaaaacactagctttcgttcctta

SEQ ID NO: 10 - DNA, 4864 bp, Homo sapien
ctctggggaaaatgtctacttattctgtctctgtttgttttttgtttttttaatatatactttctttctgcctgggatgtttttactgccagcaaatgccagaaaattcttgggaaaaatgcagcactctgggaatatgaagtttataaatttaaagaaattggacagcttaaggctattagtccttatttgccaagaggtgatccagttctgaaaccactcatctatgaaatgatcttacatgaatttttggagagtgattatgagggttttgccacattgatccgagaatggcctggagatctgtataataattcagtcatagttcaagcagttcgggatcatttgaagaaagatagtcagaacaagactttacttaaaaccctggcagaattgtacacctatgacaagaactatggcaatgctctggaaatatacttaacattaagacataaagacgtttttcagttgatccacaagcataatcttttcagttctatcaaggataaaattgttttattaatggattttgattcagagaaagctgttgacatgcttttggacaatgaagataaaatttcaattaaaaaggtagtggaagaattggaagacagaccagagctacagcatgtgtatttgcataagcttttcaagagagaccaccataaggggcagcgttaccatgaaaaacagatcagtctttatgctgaatatgatcgaccaaacttacttccctttctccgagacagtacccattgcccacttgaaaaggctcttgagatctgtcaacagagaaactttgtagaagagacagtttatcttctgagccgaatgggtaatagccgaagtgccctgaagatgattatggaggaattacatgatgttgataaagcaatcgaatttgccaaggagcaagatgatggagagctgtgggaagatttgattttatattccattgacaaaccaccatttattactggcttgttaaacaacattggcacacatgttgacccaattctactgattcaccgtattaaggaaggaatggagatccccaatttgagagattccttggttaaaattctgcaagactacaatttgcaaattctgcttcgtgaaggctgcaagaagattctcgtagctgactctttgtccttactgaagaaaatgcaccgaactcaaatgaaaggtgttcttgttgatgaggagaacatctgtgagtcgtgcctttcccctattcttccatcagatgcagctaagcccttcagcgtggtggtcttccattgccggcacatgttccacaaggagtgcctgcccatgcccagcatgaactctgctgcacagttctgcaacatctgcagtgctaagaaccgtggaccaggaagtgcaattttggagatgaaaaaatagctcatttctccttgtcagtctccttgtcaccactctttttgagactgtttttgcaacaacaaaagcatttgttgacactcgtgctgttaagagatttgtttatgtttatattatactcaaaaacaatttcttcatctattcctgtactaatggtttctctttgcagttcacagagaatttggggctctcttcatgccttgaaattttggggtccatagtgaatattttgttatttatttgtttggctcattctttatatagtaatggaaacataagtctaggagttagaaatgaattttttagaccttagtaaaaccatttaaccataaaatggacaactgagaattctcccagctgcctgaaagcgtcgccaactgtggttatcctgcaagctgctacctgcaacttggacgttgtttccacgtgctctgctggctacgattcttgcattctgggtttggcttttttctgtgtcatcaactatggttatcctctaaataggcatttaatgaaacattgtacaaattgtcactcatttgatgacacctgggaataacattagcaggctgatgtcctgcaccattatgtttactaatcacatgttctgtgtgctgtgacgactgtcaaagagtatctggccatggcggacactcagcatttgttgattgaataaatgttagctcttctcattgtgaaggactcacttttactgggataaacaaatgcagttaagaattctggcacccttgtaaggaagaaaagagagttcaacaccttcgagtctgagcgcttgtggctagagtttgccaggagggaggaaaccagtgaccctgaaaactgagggtgcctcaggagcagtgggaccacctgatgctgaaggacggactaatgatgtttcctcttgccttctctggtgcctccattgccctcatggaacagagcatatcatagagggagaaaagtcaaacttgtaattgtgtcttacagttactggcttcatcttccttgggatatatggtcatcctctaatgagtgtaaaagtgcgcaaaacacatccttattgttcctgatctcttagtcccataaatgggaacaaatacagctttctgcttctttctttttggggaaaggacagggtgctagtgagtactgacagcatgccagctaccgaagtcacccagccattcccatgagcagcagttcatttaattgtcacagcgtcgccaggaagaagatctgataaacctaggtttacagataaagaaagcaaaatgtagagatgttgttgaggtcacagaggtgactgcctaacttcagagcagggcttctgatccctttaagaaattacagggccagccgggcatggtggctcacgcccgtaatcccagggctttgggaggccttggcaggtggatcacctgagatcgcacgttcgagaccagcctgaccaacatggagaaaccccatctctactaaaaacacaaattggccaggcatggtggtgcatgcctgtaatcccagctactcaggaggctgaggcaggagaatcacttgaccccaggagacgtaggttgtggtgagctgagatcgcgccattgcactccagcctgggcaacaagagcaaaactccgtctcaaaaaagaaaagaaaagaaaagaaatcatagggccaagttcaaaggaaatgcacagaacatatcttcacattagagttaagaattctctagcaaacaacagatttttttgttgttgttagtcacaaatacttagaactggaaggctctttgttattattgaatgtacccctcagccttctcagcatttccttatcccaagactagtgtgctttctgctacactgctagttttcagttttgttcttacccaattgttttttcttttcaacattaccaatttacagattcagtttattacatttacattaatcctcacttatgatttgagcaagctcatttccagaaaagtttactttaagatcatcaataggatttgctaatttcagtgaagtcattttgcttcaggggtaaattatcctagttaccaagtcctatttggacataaagaaaatcctacttatagaaaaggagaaaataattaaacagtcttcatttttaagtaactgatttaaaaggaaaataataaaatatgttcgtttatcatttcagaaattgctgtaacacactggaaaattcctgaacaatatagattttatcgttaataaaaaacactagctttcgttccttagaatgtcttttcttttgaataaacagtattgggtgatttattaaaggatattcaatcctttttacttttcatcaacctataagggcttaaatatggcaaaataatccaagtgttagtcaattatttttcatgtgtgactagcccaatttaaaatataggtaaaaaggaaacccattcccctcgttttggggaagaacatagttgcaaagtacacacttcataagctattctttttttttttttttttttttttttttttgagatggagtctcgttctgttgccttggctggagtgcagtgacatgatcttggctcactgcaacctccgcctcccaggttcaagtgattctcccgtctcagcttccggagtgggtgggagtgcaggcacgcaccaccatgcccagctaattttttgtactttggtagagatggggtttcaccatgttgcccaagctggtctcgaactcctgagctcaggaatccgcccacctcggccttccgaagtgttgggattacgggcgtaagtcaccatgcccagccaagaaagctattcttgaagtgtaaaacagccaggtgcaaaattattttggagtactttagtttgcttttgtttttagccaaagggatttcatactggtttaattatgttcatccttgagaatttttgagaagtttccaacagatttgtagttcattttgctgttgttacaatgtaaagctatatatagttgacccttgaacaacacaggttggaactgcaaggatccacttatacatggattttcttctgcctctgccacccttgagacggcaagaccaggccctccccttcctcctccttctcagcctactcagtatgaagacgacagagatgaaacacttatgatgatccacttctacttaatgagtagtaaatatattttcttttccttatgattttcttactattttctttagcttgctttattataagaatatagcatataatataaataaaatataaaatatgtgttaatggtctatttatgtcaccagtaaggcttccagtccacagtagtctattagtagttaggttttgggggaattatacgtggatttttgactgcatggggtgtcagcacctcatcccccacattgttcaaggttctactgtattttaatattaaaaaccaaacatgcattgagtaatta

SEQ ID NO: 11 - DNA, 5596 bp, Homo sapien
taaaccatatttttaatcaaaataaaggaagattttctcggtattagctaggattagattcaactgtgagtgataaaaatcccaaaataattgtggcttaacagagcaacagtttctttttctgtcacgtggaagtgttggtggagtggccctgctgagagcaccatgccgcggggtcagagaccggggctccttcctcttgttcgtccaccttgggtgaccttgacctcatgacgtaaggtagtgccatccaatagtggagagtcagggtaagggaagcatttcaggcaaggggacgcaatggagaggtgagcagaggcaggtgaagctgcacagaaattaagggctaggttgtggatgccttgtaagtcgtggtagagattctcagctttaagtctgagtggagcgatgcaatagaaagttttgtaggcagggtatgagataaggtttcccaggtgcactcattcatcatactgcacccggttcagatgccacttccccttgaagcttctcacaagaggaccacacagtttcagtgtccctcctctgtacacatggccctttgttcatgttactctaatcgtggaataatgcgttgtcacatctctgtcacttcctggaccctgagctcccgggggtggactcatgctgctaatgctcctactaagcctcctccattattctcttctttgttttcctcttacctataatcatcactaacatttttattattgtcatctttgcatctctatctaacctgaccctctagcacccagcacagagcatatagtaaatgtatcctgattaatttagaattagtaagtaatttatcaatatatagtaggtctttttttttttttaagactaatggaaatgctctcatctgcatagttgctccttttgggatccttcttgatcatcaaaagtgttttttccttctcacctttgacagatccttgagcagagttctctttcagcccctgtgatctggcagtacaaatattcctagtaaattcaatcattcattcgttcattcatgcagcatgaattcatatttcctgagcttatggtatgcacaatactaggaaaagttcaaccatgagcaacattccttacatcttaatggagggaaacagagcttaaacaaatgactacagatttggaaggaagcagtgctgtaaggaaacctgaagtagtgtaaagagagaaagcttagtgggaaaggccctttcttttcatttggtgtcttgttttctactcttgctcatgaaatgttctgagtagcttcaaatatgttttaaattgaattgtgtagagtccagtacctctgagaggtaactgagtgcagctattctagggagatgtgttctttatttgtttgctttgttttatttttaaagaagctgtggaaaaattctttcaagtgtaagtttaaatgactttattactgtttgttcttatttggtcgcctatagtaacatttttaccctgctttaattgaaggctcttgagatctgtcaacagagaaactttgtagaagagacagtttatcttctgagccgaatgggtaatagccgaagtgccctgaagatgattatggaggaattacatgatgttgataaagcaatcgaatttgccaaggagcaagatgatggagagctgtgggaagatttgattttatattccattgacaaaccaccatttattactggcttgttaaacaacattggcacacatgttgacccaattctactgattcaccgtattaaggaaggaatggagatccccaatttgagagattccttggttaaaattctgcaagactacaatttgcaaattctgcttcgtgaaggctgcaagaagattctcgtagctgactctttgtccttactgaagaaaatgcaccgaactcaaatgaaaggtgttcttgttgatgaggagaacatctgtgagtcgtgcctttcccctattcttccatcagatgcagctaagcccttcagcgtggtggtcttccattgccggcacatgttccacaaggagtgcctgcccatgcccagcatgaactctgctgcacagttctgcaacatctgcagtgctaagaaccgtggaccaggaagtgcaattttggagatgaaaaaatagctcatttctccttgtcagtctccttgtcaccactctttttgagactgtttttgcaacaacaaaagcatttgttgacactcgtgctgttaagagatttgtttatgtttatattatactcaaaaacaatttcttcatctattcctgtactaatggtttctctttgcagttcacagagaatttggggctctcttcatgccttgaaattttggggtccatagtgaatattttgttatttatttgtttggctcattctttatatagtaatggaaacataagtctaggagttagaaatgaattttttagaccttagtaaaaccatttaaccataaaatggacaactgagaattctcccagctgcctgaaagcgtcgccaactgtggttatcctgcaagctgctacctgcaacttggacgttgtttccacgtgctctgctggctacgattcttgcattctgggtttggcttttttctgtgtcatcaactatggttatcctctaaataggcatttaatgaaacattgtacaaattgtcactcatttgatgacacctgggaataacattagcaggctgatgtcctgcaccattatgtttactaatcacatgttctgtgtgctgtgacgactgtcaaagagtatctggccatggcggacactcagcatttgttgattgaataaatgttagctcttctcattgtgaaggactcacttttactgggataaacaaatgcagttaagaattctggcacccttgtaaggaagaaaagagagttcaacaccttcgagtctgagcgcttgtggctagagtttgccaggagggaggaaaccagtgaccctgaaaactgagggtgcctcaggagcagtgggaccacctgatgctgaaggacggactaatgatgtttcctcttgccttctctggtgcctccattgccctcatggaacagagcatatcatagagggagaaaagtcaaacttgtaattgtgtcttacagttactggcttcatcttccttgggatatatggtcatcctctaatgagtgtaaaagtgcgcaaaacacatccttattgttcctgatctcttagtcccataaatgggaacaaatacagctttctgcttctttctttttggggaaaggacagggtgctagtgagtactgacagcatgccagctaccgaagtcacccagccattcccatgagcagcagttcatttaattgtcacagcgtcgccaggaagaagatctgataaacctaggtttacagataaagaaagcaaaatgtagagatgttgttgaggtcacagaggtgactgcctaacttcagagcagggcttctgatccctttaagaaattacagggccagccgggcatggtggctcacgcccgtaatcccagggctttgggaggccttggcaggtggatcacctgagatcgcacgttcgagaccagcctgaccaacatggagaaaccccatctctactaaaaacacaaattggccaggcatggtggtgcatgcctgtaatcccagctactcaggaggctgaggcaggagaatcacttgaccccaggagacgtaggttgtggtgagctgagatcgcgccattgcactccagcctgggcaacaagagcaaaactccgtctcaaaaaagaaaagaaaagaaaagaaatcatagggccaagttcaaaggaaatgcacagaacatatcttcacattagagttaagaattctctagcaaacaacagatttttttgttgttgttagtcacaaatacttagaactggaaggctctttgttattattgaatgtacccctcagccttctcagcatttccttatcccaagactagtgtgctttctgctacactgctagttttcagttttgttcttacccaattgttttttcttttcaacattaccaatttacagattcagtttattacatttacattaatcctcacttatgatttgagcaagctcatttccagaaaagtttactttaagatcatcaataggatttgctaatttcagtgaagtcattttgcttcaggggtaaattatcctagttaccaagtcctatttggacataaagaaaatcctacttatagaaaaggagaaaataattaaacagtcttcatttttaagtaactgatttaaaaggaaaataataaaatatgttcgtttatcatttcagaaattgctgtaacacactggaaaattcctgaacaatatagattttatcgttaataaaaaacactagctttcgttccttagaatgtcttttcttttgaataaacagtattgggtgatttattaaaggatattcaatcctttttacttttcatcaacctataagggcttaaatatggcaaaataatccaagtgttagtcaattatttttcatgtgtgactagcccaatttaaaatataggtaaaaaggaaacccattcccctcgttttggggaagaacatagttgcaaagtacacacttcataagctattctttttttttttttttttttttttttttttgagatggagtctcgttctgttgccttggctggagtgcagtgacatgatcttggctcactgcaacctccgcctcccaggttcaagtgattctcccgtctcagcttccggagtgggtgggagtgcaggcacgcaccaccatgcccagctaattttttgtactttggtagagatggggtttcaccatgttgcccaagctggtctcgaactcctgagctcaggaatccgcccacctcggccttccgaagtgttgggattacgggcgtaagtcaccatgcccagccaagaaagctattcttgaagtgtaaaacagccaggtgcaaaattattttggagtactttagtttgcttttgtttttagccaaagggatttcatactggtttaattatgttcatccttgagaatttttgagaagtttccaacagatttgtagttcattttgctgttgttacaatgtaaagctatatatagttgacccttgaacaacacaggttggaactgcaaggatccacttatacatggattttcttctgcctctgccacccttgagacggcaagaccaggccctccccttcctcctccttctcagcctactcagtatgaagacgacagagatgaaacacttatgatgatccacttctacttaatgagtagtaaatatattttcttttccttatgattttcttactattttctttagcttgctttattataagaatatagcatataatataaataaaatataaaatatgtgttaatggtctatttatgtcaccagtaaggcttccagtccacagtagtctattagtagttaggttttgggggaattatacgtggatttttgactgcatggggtgtcagcacctcatcccccacattgttcaaggttctactgtattttaatattaaaaaccaaacatgcattgagtaatta

SEQ ID NO: 12 - DNA, 4848 bp, Homo sapien
ctctcagtttcctactaatacctaagaaaacccagcaaagggtgggagctcacactgtgccccacagaatggacatgaaaggtaaagtgtcgcctgtccctgctgtgtccccacctaaaagcaggggaggatcttggaccccatcgtgcctccagttctgaaatacaacattggtaccagccagaaatgggcatcatcctccactgtgtgcttctgacttctgaggctgccaaagcattgtgatgtctcttgtcattctccaggcaggaagggaggaaatagtaaaaagcctgcaggggaataagaaaaatgtgtaaagaaacaaaagctataatgctgggatgaagaataaagaaaaggactcttatgagagaatatttgtattcatggtcatttttcaaacccctcccaggagtcaccaaatttgaaggttattatagtcagttaataccacacacacacacacaccacattcatagcactatgctgaatggtttggattagatttggaaagaaaaagataggttgcatcctcaaggggatttaagacagagattgtatctgtttagtttattatctatacccagtaccctatacgtgatagggacccagtacttatttgtgcagtaaatagattaatttatgaaataaattgatgattttggaatagcaggttttcattctgggtaaagatctgaagaatggaatgaacacatgatgtaggagccaaagtctgcccaagaggatctgtataaggaagccctctaaagtagcaatagggttagttaatatagggccttctttgccagactttggaatttatgtttgattatacaaatgctacaggagcccgtgtatggttggaagaaatgatgaaatgacgcacagagtaatgagtggatcctggctggccaggtcagcctggcagtggtttggcaggaagagggtactgagggcaagagaatcagtgagtgccccttttgagtatttcaagcatgccagcttttggaatccccagtacagtgtcccttcacccctcagatttgagtctacttaagatggcttttcttttaaaatgtatgcattagattctgcttcgtgaaggctgcaagaagattctcgtagctgactctttgtccttactgaagaaaatgcaccgaactcaaatgaaaggtgttcttgttgatgaggagaacatctgtgagtcgtgcctttcccctattcttccatcagatgcagctaagcccttcagcgtggtggtcttccattgccggcacatgttccacaaggagtgcctgcccatgcccagcatgaactctgctgcacagttctgcaacatctgcagtgctaagaaccgtggaccaggaagtgcaattttggagatgaaaaaatagctcatttctccttgtcagtctccttgtcaccactctttttgagactgtttttgcaacaacaaaagcatttgttgacactcgtgctgttaagagatttgtttatgtttatattatactcaaaaacaatttcttcatctattcctgtactaatggtttctctttgcagttcacagagaatttggggctctcttcatgccttgaaattttggggtccatagtgaatattttgttatttatttgtttggctcattctttatatagtaatggaaacataagtctaggagttagaaatgaattttttagaccttagtaaaaccatttaaccataaaatggacaactgagaattctcccagctgcctgaaagcgtcgccaactgtggttatcctgcaagctgctacctgcaacttggacgttgtttccacgtgctctgctggctacgattcttgcattctgggtttggcttttttctgtgtcatcaactatggttatcctctaaataggcatttaatgaaacattgtacaaattgtcactcatttgatgacacctgggaataacattagcaggctgatgtcctgcaccattatgtttactaatcacatgttctgtgtgctgtgacgactgtcaaagagtatctggccatggcggacactcagcatttgttgattgaataaatgttagctcttctcattgtgaaggactcacttttactgggataaacaaatgcagttaagaattctggcacccttgtaaggaagaaaagagagttcaacaccttcgagtctgagcgcttgtggctagagtttgccaggagggaggaaaccagtgaccctgaaaactgagggtgcctcaggagcagtgggaccacctgatgctgaaggacggactaatgatgtttcctcttgccttctctggtgcctccattgccctcatggaacagagcatatcatagagggagaaaagtcaaacttgtaattgtgtcttacagttactggcttcatcttccttgggatatatggtcatcctctaatgagtgtaaaagtgcgcaaaacacatccttattgttcctgatctcttagtcccataaatgggaacaaatacagctttctgcttctttctttttggggaaaggacagggtgctagtgagtactgacagcatgccagctaccgaagtcacccagccattcccatgagcagcagttcatttaattgtcacagcgtcgccaggaagaagatctgataaacctaggtttacagataaagaaagcaaaatgtagagatgttgttgaggtcacagaggtgactgcctaacttcagagcagggcttctgatccctttaagaaattacagggccagccgggcatggtggctcacgcccgtaatcccagggctttgggaggccttggcaggtggatcacctgagatcgcacgttcgagaccagcctgaccaacatggagaaaccccatctctactaaaaacacaaattggccaggcatggtggtgcatgcctgtaatcccagctactcaggaggctgaggcaggagaatcacttgaccccaggagacgtaggttgtggtgagctgagatcgcgccattgcactccagcctgggcaacaagagcaaaactccgtctcaaaaaagaaaagaaaagaaaagaaatcatagggccaagttcaaaggaaatgcacagaacatatcttcacattagagttaagaattctctagcaaacaacagatttttttgttgttgttagtcacaaatacttagaactggaaggctctttgttattattgaatgtacccctcagccttctcagcatttccttatcccaagactagtgtgctttctgctacactgctagttttcagttttgttcttacccaattgttttttcttttcaacattaccaatttacagattcagtttattacatttacattaatcctcacttatgatttgagcaagctcatttccagaaaagtttactttaagatcatcaataggatttgctaatttcagtgaagtcattttgcttcaggggtaaattatcctagttaccaagtcctatttggacataaagaaaatcctacttatagaaaaggagaaaataattaaacagtcttcatttttaagtaactgatttaaaaggaaaataataaaatatgttcgtttatcatttcagaaattgctgtaacacactggaaaattcctgaacaatatagattttatcgttaataaaaaacactagctttcgttccttagaatgtcttttcttttgaataaacagtattgggtgatttattaaaggatattcaatcctttttacttttcatcaacctataagggcttaaatatggcaaaataatccaagtgttagtcaattatttttcatgtgtgactagcccaatttaaaatataggtaaaaaggaaacccattcccctcgttttggggaagaacatagttgcaaagtacacacttcataagctattctttttttttttttttttttttttttttttgagatggagtctcgttctgttgccttggctggagtgcagtgacatgatcttggctcactgcaacctccgcctcccaggttcaagtgattctcccgtctcagcttccggagtgggtgggagtgcaggcacgcaccaccatgcccagctaattttttgtactttggtagagatggggtttcaccatgttgcccaagctggtctcgaactcctgagctcaggaatccgcccacctcggccttccgaagtgttgggattacgggcgtaagtcaccatgcccagccaagaaagctattcttgaagtgtaaaacagccaggtgcaaaattattttggagtactttagtttgcttttgtttttagccaaagggatttcatactggtttaattatgttcatccttgagaatttttgagaagtttccaacagatttgtagttcattttgctgttgttacaatgtaaagctatatatagttgacccttgaacaacacaggttggaactgcaaggatccacttatacatggattttcttctgcctctgccacccttgagacggcaagaccaggccctccccttcctcctccttctcagcctactcagtatgaagacgacagagatgaaacacttatgatgatccacttctacttaatgagtagtaaatatattttcttttccttatgattttcttactattttctttagcttgctttattataagaatatagcatataatataaataaaatataaaatatgtgttaatggtctatttatgtcaccagtaaggcttccagtccacagtagtctattagtagttaggttttgggggaattatacgtggatttttgactgcatggggtgtcagcacctcatcccccacattgttcaaggttctactgtattttaatattaaaaaccaaacatgcattgagtaatta

SEQ ID NO: 13 - DNA, 3374 bp, Homo sapien
ttgctgtcaggtgactctcccgtggcgccatggcggaagcagaggagcaggaaactgggtcccttgaagaatctacagatgagtctgaggaagaagagagcgaagaggaacccaagctgaagtatgaaaggctttccaatggggtaactgaaatacttcagaaggatgcagctagctgcatgacagtccatgacaagtttttggcattgggcacacattatggcaaggtttatttacttgatgtccaggggaacatcactcagaagtttgatgtaagtcctgtgaagataaatcagattagcttggatgaaagtggagagcacatgggtgtgtgttcagaggatggcaaggtgcaggtatttggactgtattctggagaagaatttcacgagacttttgactgtcccattaaaattattgctgtgcacccacatttcgtgagatccagttgcaagcagtttgtgaccggagggaagaagctgctactgtttgaacggtcttggatgaacagatggaagtctgctgttctgcatgaaggggaagggaacataaggagtgtgaagtggagaggccatctgattgcttgggccaataatatgggtgtgaagatttttgacatcatctcaaagcaaagaatcaccaatgtgccccgggatgatataagtcttcgcccagacatgtatccctgcagcctctgctggaaggacaatgtgacactgattattggctgggggacttctgtcaaggtgtgctcagtgaaggaacggcatgccagtgaaatgagggatttgccaagtcgatatgttgaaatagtgtctcagtttgaaactgaattctacatcagtggacttgcacctctctgtgatcagcttgttgtactttcgtatgtaaaggagatttcagaaaaaacggaaagagaatactgtgccaggcctagactggacatcatccagccactttctgagacttgtgaagagatctcttctgatgctttgacagtcagaggctttcaggagaatgaatgtagagattatcatttagaatactctgaaggggaatcacttttttacatcgtgagtccgagagatgttgtagtggccaaggaacgagaccaagatgatcacattgactggctccttgaaaagaagaaatatgaagaagcattgatggcagctgaaattagccaaaaaaatattaaaagacataagattctggatattggcttggcatatataaatcacctggtggagagaggagactatgacatagcagcacgcaaatgccagaaaattcttgggaaaaatgcagcactctgggaatatgaagtttataaatttaaagaaattggacagcttaaggctattagtccttatttgccaagaggtgatccagttctgaaaccactcatctatgaaatgatcttacatgaatttttggagagtgattatgagggttttgccacattgatccgagaatggcctggagatctgtataataattcagtcatagttcaagcagttcgggatcatttgaagaaagatagtcagaacaagactttacttaaaaccctggcagaattgtacacctatgacaagaactatggcaatgctctggaaatatacttaacattaagacataaagacgtttttcagttgatccacaagcataatcttttcagttctatcaaggataaaattgttttattaatggattttgattcagagaaagctgttgacatgcttttggacaatgaagataaaatttcaattaaaaaggtagtggaagaattggaagacagaccagagctacagcatgtgtatttgcataagcttttcaagagagaccaccataaggggcagcgttaccatgaaaaacagatcagtctttatgctgaatatgatcgaccaaacttacttccctttctccgagacagtacccattgcccacttgaaaaggctcttgagatctgtcaacagagaaactttgtagaagagacagtttatcttctgagccgaatgggtaatagccgaagtgccctgaagatgattatggaggaattacatgatgttgataaagcaatcgaatttgccaaggagcaagatgatggagagctgtgggaagatttgattttatattccattgacaaaccaccatttattactggcttgttaaacaacattggcacacatgttgacccaattctactgattcaccgtattaaggaaggaatggagatccccaatttgagagattccttggttaaaattctgcaagactacaatttgcaaattctgcttcgtgaaggctgcaagaagattctcgtagctgactctttgtccttactgaagaaaatgcaccgaactcaaatgaaaggtgttcttgttgatgaggagaacatctgtgagtcgtgcctttcccctattcttccatcagaataacccagtggagagaagtgttgtggcttccatcctgctcagtggaatgctggtgctgccattgcttagagctgaggttctcaagctctaggatgcagctaagcccttcagcgtggtggtcttccattgccggcacatgttccacaaggagtgcctgcccatgcccagcatgaactctgctgcacagttctgcaacatctgcagtgctaagaaccgtggaccaggaagtgcaattttggagatgaaaaaatagctcatttctccttgtcagtctccttgtcaccactctttttgagactgtttttgcaacaacaaaagcatttgttgacactcgtgctgttaagagatttgtttatgtttatattatactcaaaaacaatttcttcatctattcctgtactaatggtttctctttgcagttcacagagaatttggggctctcttcatgccttgaaattttggggtccatagtgaatattttgttatttatttgtttggctcattctttatatagtaatggaaacataagtctaggagttagaaatgaattttttagaccttagtaaaaccatttaaccataaaatggacaactgagaattctcccagctgcctgaaagcgtcgccaactgtggttatcctgcaagctgctacctgcaacttggacgttgtttccacgtgctctgctggctacgattcttgcattctgggtttggcttttttctgtgtcatcaactatggttatcctctaaataggcatttaatgaaacattgtacaaattgtcactcatttgatgacacctgggaataacattagcaggctgatgtcctgcaccattatgtttactaatcacatgttctgtgtgctgtgacgactgtcaaagagtatctggccatggcggacactcagcatttgttgattgaataaatgttagctcttc

SEQ ID NO: 14 - DNA, 4572 bp, Homo sapien
gcatttgtttatttctagttcttggcagatagatatatgtcttcatctgtaatgaaaagcaccttcttaaggtttattatgacagaagaaatttgcataattcaaaagcggaaactaacaaagcattgttaggatgctaacaaatgcttttcaaatataagttcagcataacaaagtactaaaagacctagttgacctcatgtttacttaggattaaaggattatttcatggggcagtccatgagaagttgttctacttaggttcttttctagaggaattagatttggatgtttaagtgcttctgttgaaaactgcatgggctcaggtgaagaagtgagcttccatagcatttcagacagtgttgcagcaaaaaggaaccacatacattcccactctacagttagatttaactccaaatttactctgctgatgacactaaatcttaccaaaaataagctggccacacagagcaggaacagatgaggggatctgcccaagcacaagtgcagtaaaatgcaaggtcaccacagcctgggcttgtaacccaggtccgcctctgagtcagtgtgtggtcttggcaaaggtagcaggtggactggcaaagcatttttatgaagccacagactcaacttcagctgtggtgtataatgattataggggttaggggcgcattggcacatacacttgctggttttcctacagttgtcctcaatgtagtctgggtaagtgacacagaggctaagcaagtaacctgtgaatcgcatagcaacatgattataatacctgttttgtgtctgatcataccacccctcaggaatgcttttgtaaataagccattctctaaaggcaccttattgctgaaaattaaactgcaactcgactttcagtcgggattggtttaaaatgatcttgcttgttgcattaagttctcctcctttctctgccctcctcgccagatgcagctaagcccttcagcgtggtggtcttccattgccggcacatgttccacaaggagtgcctgcccatgcccagcatgaactctgctgcacagttctgcaacatctgcagtgctaagaaccgtggaccaggaagtgcaattttggagatgaaaaaatagctcatttctccttgtcagtctccttgtcaccactctttttgagactgtttttgcaacaacaaaagcatttgttgacactcgtgctgttaagagatttgtttatgtttatattatactcaaaaacaatttcttcatctattcctgtactaatggtttctctttgcagttcacagagaatttggggctctcttcatgccttgaaattttggggtccatagtgaatattttgttatttatttgtttggctcattctttatatagtaatggaaacataagtctaggagttagaaatgaattttttagaccttagtaaaaccatttaaccataaaatggacaactgagaattctcccagctgcctgaaagcgtcgccaactgtggttatcctgcaagctgctacctgcaacttggacgttgtttccacgtgctctgctggctacgattcttgcattctgggtttggcttttttctgtgtcatcaactatggttatcctctaaataggcatttaatgaaacattgtacaaattgtcactcatttgatgacacctgggaataacattagcaggctgatgtcctgcaccattatgtttactaatcacatgttctgtgtgctgtgacgactgtcaaagagtatctggccatggcggacactcagcatttgttgattgaataaatgttagctcttctcattgtgaaggactcacttttactgggataaacaaatgcagttaagaattctggcacccttgtaaggaagaaaagagagttcaacaccttcgagtctgagcgcttgtggctagagtttgccaggagggaggaaaccagtgaccctgaaaactgagggtgcctcaggagcagtgggaccacctgatgctgaaggacggactaatgatgtttcctcttgccttctctggtgcctccattgccctcatggaacagagcatatcatagagggagaaaagtcaaacttgtaattgtgtcttacagttactggcttcatcttccttgggatatatggtcatcctctaatgagtgtaaaagtgcgcaaaacacatccttattgttcctgatctcttagtcccataaatgggaacaaatacagctttctgcttctttctttttggggaaaggacagggtgctagtgagtactgacagcatgccagctaccgaagtcacccagccattcccatgagcagcagttcatttaattgtcacagcgtcgccaggaagaagatctgataaacctaggtttacagataaagaaagcaaaatgtagagatgttgttgaggtcacagaggtgactgcctaacttcagagcagggcttctgatccctttaagaaattacagggccagccgggcatggtggctcacgcccgtaatcccagggctttgggaggccttggcaggtggatcacctgagatcgcacgttcgagaccagcctgaccaacatggagaaaccccatctctactaaaaacacaaattggccaggcatggtggtgcatgcctgtaatcccagctactcaggaggctgaggcaggagaatcacttgaccccaggagacgtaggttgtggtgagctgagatcgcgccattgcactccagcctgggcaacaagagcaaaactccgtctcaaaaaagaaaagaaaagaaaagaaatcatagggccaagttcaaaggaaatgcacagaacatatcttcacattagagttaagaattctctagcaaacaacagatttttttgttgttgttagtcacaaatacttagaactggaaggctctttgttattattgaatgtacccctcagccttctcagcatttccttatcccaagactagtgtgctttctgctacactgctagttttcagttttgttcttacccaattgttttttcttttcaacattaccaatttacagattcagtttattacatttacattaatcctcacttatgatttgagcaagctcatttccagaaaagtttactttaagatcatcaataggatttgctaatttcagtgaagtcattttgcttcaggggtaaattatcctagttaccaagtcctatttggacataaagaaaatcctacttatagaaaaggagaaaataattaaacagtcttcatttttaagtaactgatttaaaaggaaaataataaaatatgttcgtttatcatttcagaaattgctgtaacacactggaaaattcctgaacaatatagattttatcgttaataaaaaacactagctttcgttccttagaatgtcttttcttttgaataaacagtattgggtgatttattaaaggatattcaatcctttttacttttcatcaacctataagggcttaaatatggcaaaataatccaagtgttagtcaattatttttcatgtgtgactagcccaatttaaaatataggtaaaaaggaaacccattcccctcgttttggggaagaacatagttgcaaagtacacacttcataagctattctttttttttttttttttttttttttttttgagatggagtctcgttctgttgccttggctggagtgcagtgacatgatcttggctcactgcaacctccgcctcccaggttcaagtgattctcccgtctcagcttccggagtgggtgggagtgcaggcacgcaccaccatgcccagctaattttttgtactttggtagagatggggtttcaccatgttgcccaagctggtctcgaactcctgagctcaggaatccgcccacctcggccttccgaagtgttgggattacgggcgtaagtcaccatgcccagccaagaaagctattcttgaagtgtaaaacagccaggtgcaaaattattttggagtactttagtttgcttttgtttttagccaaagggatttcatactggtttaattatgttcatccttgagaatttttgagaagtttccaacagatttgtagttcattttgctgttgttacaatgtaaagctatatatagttgacccttgaacaacacaggttggaactgcaaggatccacttatacatggattttcttctgcctctgccacccttgagacggcaagaccaggccctccccttcctcctccttctcagcctactcagtatgaagacgacagagatgaaacacttatgatgatccacttctacttaatgagtagtaaatatattttcttttccttatgattttcttactattttctttagcttgctttattataagaatatagcatataatataaataaaatataaaatatgtgttaatggtctatttatgtcaccagtaaggcttccagtccacagtagtctattagtagttaggttttgggggaattatacgtggatttttgactgcatggggtgtcagcacctcatcccccacattgttcaaggttctactgtattttaatattaaaaaccaaacatgcattgagtaatta

SEQ ID NO: 15 - DNA, 2903 bp, Homo sapien
ttgctgtcaggtgactctcccgtggcgccatggcggaagcagaggagcaggaaactgggtcccttgaagaatctacagatgagtctgaggaagaagagagcgaagaggaacccaagctgaagtatgaaaggctttccaatggggtaactgaaatacttcagaaggatgcagctagctgcatgacagtccatgacaagtttttggcattgggcacacattatggcaaggtttatttacttgatgtccaggggaacatcactcagaagtttgatgtaagtcctgtgaagataaatcagattagcttggatgaaagtggagagcacatgggtgtgtgttcagaggatggcaaggtgcaggtatttggactgtattctggagaagaatttcacgagacttttgactgtcccattaaaattattgctgtgcacccacatttcgtgagatccagttgcaagcagtttgtgaccggagggaagaagctgctactgtttgaacggtcttggatgaacagatggaagtctgctgttctgcatgaaggggaagggaacataaggagtgtgaagtggagaggccatctgattgcttgggccaataatatgggtgtgaagatttttgacatcatctcaaagcaaagaatcaccaatgtgccccgggatgatataagtcttcgcccagacatgtatccctgcagcctctgctggaaggacaatgtgacactgattattggctgggggacttctgtcaaggtgtgctcagtgaaggaacggcatgccagtgaaatgagggatttgccaagtcgatatgttgaaatagtgtctcagtttgaaactgaattctacatcagtggacttgcacctctctgtgatcagcttgttgtactttcgtatgtaaaggagatttcagaaaaaacggaaagagaatactgtgccaggcctagactggacatcatccagccactttctgagacttgtgaagagatctcttctgatgctttgacagtcagaggctttcaggagaatgaatgtagagattatcatttagaatactctgaaggggaatcacttttttacatcgtgagtccgagagatgttgtagtggccaaggaacgagaccaagatgatcacattgactggctccttgaaaagaagaaatatgaagaagcattgatggcagctgaaattagccaaaaaaatattaaaagacataagattctggatattggcttggcatatataaatcacctggtggagagaggagactatgacatagcagcacgcaaatgccagaaaattcttgggaaaaatgcagcactctgggaatatgaagtttataaatttaaagaaattggacagcttaaggctattagtccttatttgccaagaggtgatccagttctgaaaccactcatctatgaaatgatcttacatgaatttttggagagtgattatgagggttttgccacattgatccgagaatggcctggagatctgtataataattcagtcatagttcaagcagttcgggatcatttgaagaaagatagtcagaacaagactttacttaaaaccctggcagaattgtacacctatgacaagaactatggcaatgctctggaaatatacttaacattaagacataaagacgtttttcagttgatccacaagcataatcttttcagttctatcaaggataaaattgttttattaatggattttgattcagagaaagctgttgacatgcttttggacaatgaagataaaatttcaattaaaaaggtagtggaagaattggaagacagaccagagctacagcatgtgtatttgcataagcttttcaagagagaccaccataaggggcagcgttaccatgaaaaacagatcagtctttatgctgaatatgatcgaccaaacttacttccctttctccgagacagtacccattgcccacttgaaaaggctcttgagatctgtcaacagagaaactttgtagaagagacagtttatcttctgagccgaatgggtaatagccgaagtgccctgaagatgattatggaggaattacatgatgttgataaagcaatcgaatttgccaaggagcaagatgatggagagctgtgggaagatttgattttatattccattgacaaaccaccatttattactggcttgttaaacaacattggcacacatgttgacccaattctactgattcaccgtattaaggaaggaatggagatccccaatttgagagattccttggttaaaattctgcaagactacaatttgcaaattctgcttcgtgaaggctgcaagaagattctcgtagctgactctttgtccttactgaagaaaatgcaccgaactcaaatgaaaggtgttcttgttgatgaggagaacatctgtgagtcgtgcctttcccctattcttccatcagatgcagctaagcccttcagcgtggtggtcttccattgccggcacatgttccacaaggagtgcctgcccatgcccagcatgaactctgctgcacagttctgcaacatctgcagtgctaagaaccgtggaccaggaagtgcaattttggagatgaaaaaatagctcatttctccttgtcagtctccttgtcaccactctttttgagactgtttttgcaacaacaaaagcatttgttgacactcgtgctgttaagagatttgtttatgtttatattatactcaaaaacaatttcttcatctattcctgtactaatggtttctcttgaaaagcttatgcaaatacacatgctgtagctctggtctgtcttccaattcttccactacctttttaattgaaattttatcttcattgtccaaaagcatgtcaacagctttctctgaatcaaaatccattaataaaacaattttatcc

SEQ ID NO: 16 - DNA, 3003 bp, Homo sapien
ttgctgtcaggtgactctcccgtggcgccatggcggaagcagaggagcaggaaactgggtcccttgaagaatctacagatgagtctgaggaagaagagagcgaagaggaacccaagctgaagtatgaaaggctttccaatggggtaactgaaatacttcagaaggatgcagctagctgcatgacagtccatgacaagtttttggcattgggcacacattatggcaaggtttatttacttgatgtccaggggaacatcactcagaagtttgatgtaagtcctgtgaagataaatcagattagcttggatgaaagtggagagcacatgggtgtgtgttcagaggatggcaaggtgcaggtatttggactgtattctggagaagaatttcacgagacttttgactgtcccattaaaattattgctgtgcacccacatttcgtgagatccagttgcaagcagtttgtgaccggagggaagaagctgctactgtttgaacggtcttggatgaacagatggaagtctgctgttctgcatgaaggggaagggaacataaggagtgtgaagtggagaggccatctgattgcttgggccaataatatgggtgtgaagatttttgacatcatctcaaagcaaagaatcaccaatgtgccccgggatgatataagtcttcgcccagacatgtatccctgcagcctctgctggaaggacaatgtgacactgattattggctgggggacttctgtcaaggtgtgctcagtgaaggaacggcatgccagtgaaatgagggatttgccaagtcgatatgttgaaatagtgtctcagtttgaaactgaattctacatcagtggacttgcacctctctgtgatcagcttgttgtactttcgtatgtaaaggagatttcagaaaaaacggaaagagaatactgtgccaggcctagactggacatcatccagccactttctgagacttgtgaagagatctcttctgatgctttgacagtcagaggctttcaggagaatgaatgtagagattatcatttagaatactctgaaggggaatcacttttttacatcgtgagtccgagagatgttgtagtggccaaggaacgagaccaagatgatcacattgactggctccttgaaaagaagaaatatgaagaagcattgatggcagctgaaattagccaaaaaaatattaaaagacataagattctggatattggcttggcatatataaatcacctggtggagagaggagactatgacatagcagcacgcaaatgccagaaaattcttgggaaaaatgcagcactctgggaatatgaagtttataaatttaaagaaattggacagcttaaggctattagtccttatttgccaagaggtgatccagttctgaaaccactcatctatgaaatgatcttacatgaatttttggagagtgattatgagggttttgccacattgatccgagaatggcctggagatctgtataataattcagtcatagttcaagcagttcgggatcatttgaagaaagatagtcagaacaagactttacttaaaaccctggcagaattgtacacctatgacaagaactatggcaatgctctggaaatatacttaacattaagacataaagacgtttttcagttgatccacaagcataatcttttcagttctatcaaggataaaattgttttattaatggattttgattcagagaaagctgttgacatgcttttggacaatgaagataaaatttcaattaaaaaggtagtggaagaattggaagacagaccagagctacagcatgtgtatttgcataagcttttcaagagagaccaccataaggggcagcgttaccatgaaaaacagatcagtctttatgctgaatatgatcgaccaaacttacttccctttctccgagacagtacccattgcccacttgaaaaggctcttgagatctgtcaacagagaaactttgtagaagagacagtttatcttctgagccgaatgggtaatagccgaagtgccctgaagatgattatggaggaattacatgatgttgataaagcaatcgaatttgccaaggagcaagatgatggagagctgtgggaagatttgattttatattccattgacaaaccaccatttattactggcttgttaaacaacattggcacacatgttgacccaattctactgattcaccgtattaaggaaggaatggagatccccaatttgagagattccttggttaaaattctgcaagactacaatttgcaaattctgcttcgtgaaggctgcaagaagattctcgtagctgactctttgtccttactgaagaaaatgcaccgaactcaaatgaaaggtgttcttgttgatgaggagaacatctgtgagtcgtgcctttcccctattcttccatcagatgcagctaagcccttcagcgtggtggtcttccattgccggcacatgttccacaaggagtgcctgcccatgcccagcatggtgagttggcagcttggcacctatcaactagagggaaattaacacacttagaggaatgtgctttaaactgtaacccttcatccttatggctgtatgggttaaaaaaaaattacaatgtggatttatatcacataacaaaaattaatctagttttcaaatgtaaaaatatttagaaatgttctatgtactatagtaaacataaaagcatacccatttgaaggaattcattcaggcccagttgacagctgtcatgctgtagagatgagcaacaacagtagagagccattgtgtatcttatgtgtttctcagcctgatttgtgttccatgatgctatcatttttttagtgtcatattcctccaggtcacattagacgtattctgctgttgggtgtccttggagtcacagagtaacagctgatctagactaaatcctatgttaaccagaaataaactccagagaaaggagtgccatcctattacttcctctcca

SEQ ID NO: 17 - DNA, 2358 bp, Homo sapien
ttgctgtcaggtgactctcccgtggcgccatggcggaagcagaggagcaggaaactgggtcccttgaagaatctacagatgagtctgaggaagaagagagcgaagaggaacccaagctgaagtatgaaaggctttccaatggggtaactgaaatacttcagaaggatgcagctagctgcatgacagtccatgacaagtttttggcattgggcacacattatggcaaggtttatttacttgatgtccaggggaacatcactcagaagtttgatgtaagtcctgtgaagataaatcagattagcttggatgaaagtggagagcacatgggtgtgtgttcagaggatggcaaggtgcaggtatttggactgtattctggagaagaatttcacgagacttttgactgtcccattaaaattattgctgtgcacccacatttcgtgagatccagttgcaagcagtttgtgaccggagggaagaagctgctactgtttgaacggtcttggatgaacagatggaagtctgctgttctgcatgaaggggaagggaacataaggagtgtgaagtggagaggccatctgattgcttgggccaataatatgggtgtgaagatttttgacatcatctcaaagcaaagaatcaccaatgtgccccgggatgatataagtcttcgcccagacatgtatccctgcagcctctgctggaaggacaatgtgacactgattattggctgggggacttctgtcaaggtgtgctcagtgaaggaacggcatgccagtgaaatgagggatttgccaagtcgatatgttgaaatagtgtctcagtttgaaactgaattctacatcagtggacttgcacctctctgtgatcagcttgttgtactttcgtatgtaaaggagatttcagaaaaaacggaaagagaatactgtgccaggcctagactggacatcatccagccactttctgagacttgtgaagagatctcttctgatgctttgacagtcagaggctttcaggagaatgaatgtagagattatcatttagaatactctgaaggggaatcacttttttacatcgtgagtccgagagatgttgtagtggccaaggaacgagaccaagatgatcacattgactggctccttgaaaagaagaaatatgaagaagcattgatggcagctgaaattagccaaaaaaatattaaaagacataagattctggatattggcttggcatatataaatcacctggtggagagaggagactatgacatagcagcacgcaaatgccagaaaattcttgggaaaaatgcagcactctgggaatatgaagtttataaatttaaagaaattggacagcttaaggctattagtccttatttgccaagaggtgatccagttctgaaaccactcatctatgaaatgatcttacatgaatttttggagagtgattatgagggttttgccacattgatccgagaatggcctggagatctgtataataattcagtcatagttcaagcagttcgggatcatttgaagaaagatagtcagaacaagactttacttaaaaccctggcagaattgtacacctatgacaagaactatggcaatgctctggaaatatacttaacattaagacataaagacgtttttcagttgatccacaagcataatcttttcagttctatcaaggataaaattgttttattaatggattttgattcagagaaagctgttgacatgcttttggacaatgaagataaaatttcaattaaaaaggtagtggaagaattggaagacagaccagagctacagcatgtgtatttgcataagcttttcaagagagaccaccataaggggcagcgttaccatgaaaaacagatcagtctttatgctgaatatgatcgaccaaacttacttccctttctccgagacagtacccattgcccacttgaaaaggctcttgagatctgtcaacagagaaactttgtagaagagacagtttatcttctgagccgaatgggtaatagccgaagtgccctgaagatgattatggaggaattacatgatgttgataaagcaatcgaatttgccaaggagcaagatgatggagagctgtgggaagatttgattttatattccattgacaaaccaccatttattactggcttgttaaacaacattggcacacatgttgacccaattctactgattcaccgtattaaggaaggaatggagatccccaatttgagagattccttggttaaaattctgcaagactacaatttgcaacaattactatttttcaggatgctggtaacttctatagaacttgaattaaaacatttccttaaaaattcgg

SEQ ID NO: 18 - DNA, 1278 bp, Homo sapien
ttgctgtcaggtgactctcccgtggcgccatggcggaagcagaggagcaggaaactgggtcccttgaagaatctacagatgagtctgaggaagaagagagcgaagaggaacccaagctgaagtatgaaaggctttccaatggggtaactgaaatacttcagaaggatgcagctagctgcatgacagtccatgacaagtttttggcattgggcacacattatggcaaggtttatttacttgatgtccaggggaacatcactcagaagtttgatgtaagtcctgtgaagataaatcagattagcttggatgaaagtggagagcacatgggtgtgtgttcagaggatggcaaggtgcaggtatttggactgtattctggagaagaatttcacgagacttttgactgtcccattaaaattattgctgtgcacccacatttcgtgagatccagttgcaagcagtttgtgaccggagggaagaagctgctactgtttgaacggtcttggatgaacagatggaagtctgctgttctgcatgaaggggaagggaacataaggagtgtgaagtggagaggccatctgattgcttgggccaataatatgggtgtgaagatttttgacatcatctcaaagcaaagaatcaccaatgtgccccgggatgatataagtcttcgcccagacatgtatccctgcagcctctgctggaaggacaatgtgacactgattattggctgggggacttctgtcaaggtgtgctcagtgaaggaacggcatgccagtgaaatgagggatttgccaagtcgatatgttgaaatagtgtctcagtttgaaactgaattctacatcagtggacttgcacctctctgtgatcagcttgttgtactttcgtatgtaaaggagatttcagaaaaaacggaaagagaatactgtgccaggcctagactggacatcatccagccactttctgagacttgtgaagagatctcttctgatgctttgacagtcagaggctttcaggagaatgaatgtagagattatcatttagaatactctgaaggggaatcacttttttacatcgtgagtccgagagatgttgtagtggccaaggaacgagaccaagatgatcacattgactggctccttgaaaagaagaaatatgaagaagcattgatggcagctgaaattagccaaaaaaatattaaaagacataagattctggatattggcttggcatatataaatcacctggattcagaagtgagacggggatcctctatataag

SEQ ID NO: 19 - DNA, 1325 bp, Homo sapien
ttgctgtcaggtgactctcccgtggcgccatggcggaagcagaggagcaggaaactgggtcccttgaagaatctacagatgagtctgaggaagaagagagcgaagaggaacccaagctgaagtatgaaaggctttccaatggggtaactgaaatacttcagaaggatgcagctagctgcatgacagtccatgacaagtttttggcattgggcacacattatggcaaggtttatttacttgatgtccaggggaacatcactcagaagtttgatgtaagtcctgtgaagataaatcagattagcttggatgaaagtggagagcacatgggtgtgtgttcagaggatggcaaggtgcaggtatttggactgtattctggagaagaatttcacgagacttttgactgtcccattaaaattattgctgtgcacccacatttcgtgagatccagttgcaagcagtttgtgaccggagggaagaagctgctactgtttgaacggtcttggatgaacagatggaagtctgctgttctgcatgaaggggaagggaacataaggagtgtgaagtggagaggccatctgattgcttgggccaataatatgggtgtgaagatttttgacatcatctcaaagcaaagaatcaccaatgtgccccgggatgatataagtcttcgcccagacatgtatccctgcagcctctgctggaaggacaatgtgacactgattattggctgggggacttctgtcaaggtgtgctcagtgaaggaacggcatgccagtgaaatgagggatttgccaagtcgatatgttgaaatagtgtctcagtttgaaactgaattctacatcagtggacttgcacctctctgtgatcagcttgttgtactttcgtatgtaaaggagatttcagaaaaaacggaaagagaatactgtgccaggcctagactggacatcatccagccactttctgagacttgtgaagagatctcttctgactgtgatttacaagaatttccaagtattagaccccagtagacttcagactgaagcacagatatgscatgcatgcctttgaaggtgcttattactgacacataaatcctaggagaaatgtggtctctttgaatgatttctcagtgtaagagcattaaaaagacccaggtagaagggagtacggggtggtagatttcagtcttgggagaatattgtgaggttttttggggtttttttgtttattgttgttttacttactgtatgtacttaaccactccctacctttgttttgtcacacagtattacctctttcctacatatggaagctttcttgaaaaa

SEQ ID NO: 20 - DNA, 1612 bp, Homo sapien
ttgctgtcaggtgactctcccgtggcgccatggcggaagcagaggagcaggaaactgggtcccttgaagaatctacagatgagtctgaggaagaagagagcgaagaggaacccaagctgaagtatgaaaggctttccaatggggtaactgaaatacttcagaaggatgcagctagctgcatgacagtccatgacaagtttttggcattgggcacacattatggcaaggtttatttacttgatgtccaggggaacatcactcagaagtttgatgtaagtcctgtgaagataaatcagattagcttggatgaaagtggagagcacatgggtgtgtgttcagaggatggcaaggtgcaggtatttggactgtattctggagaagaatttcacgagacttttgactgtcccattaaaattattgctgtgcacccacatttcgtgagatccagttgcaagcagtttgtgaccggagggaagaaggtaagtgctgtgtgtctcctaccttgatatgtagccttgaaggggtgttgtgtgtttactctgtaatttatccttaatgtttttatgtctggctattcattaggagaaattcgagaaagacaaatgtaatgaaatctgatgatcatcatctcttgggggagttgtggcttcagtgtttctcactacattgctttttttgttgagacggagtctcgctctgtcgcccaggatggagtgcagtggcgtgatcttggctcactgcagcctccgcctcctgggttcaagtgattctcccgtctcagcttccggagtgggtgggagtgcaggcacgcaccaccatgcccagctaattttttgtactttggtagagatggggtttcaccatgttgcccaagctggtctcgaactcctgagctcaggaatccgcccacctcggccttccgaagtgttgggattacgggcgtaagtcaccatgcccagccaagaaagctattcttgaagtgtaaaacagccaggtgcaaaattattttggagtactttagtttgcttttgtttttagccaaagggatttcatactggtttaattatgttcatccttgagaatttttgagaagtttccaacagatttgtagttcattttgctgttgttacaatgtaaagctatatatagttgacccttgaacaacacaggttggaactgcaaggatccacttatacatggattttcttctgcctctgccacccttgagacggcaagaccaggccctccccttcctcctccttctcagcctactcagtatgaagacgacagagatgaaacacttatgatgatccacttctacttaatgagtagtaaatatattttcttttccttatgattttcttactattttctttagcttgctttattataagaatatagcatataatataaataaaatataaaatatgtgttaatggtctatttatgtcaccagtaaggcttccagtccacagtagtctattagtagttaggttttgggggaattatacgtggatttttgactgcatggggtgtcagcacctcatcccccacattgttcaaggttctactgtattttaatattaaaaaccaaacatgcattgagtaatta

SEQ ID NO: 21 - DNA, 1252 bp, Homo sapien
ctgtgcattggccatgactcctaaaccagagttgggttctgtttctcttgtagattattgctgtgcacccacatttcgtgagatccagttgcaagcagtttgtgaccggagggaagaaggtaagtgctgtgtgtctcctaccttgatatgtagccttgaaggggtgttgtgtgtttactctgtaatttatccttaatgtttttatgtctggctattcattaggagaaattcgagaaagacaaatgtaatgaaatctgatgatcatcatctcttgggggagttgtggcttcagtgtttctcactacattgctttttttgttgagacggagtctcgctctgtcgcccaggatggagtgcagtggcgtgatcttggctcactgcagcctccgcctcctgggttcaagtgattctcccgtctcagcttccggagtgggtgggagtgcaggcacgcaccaccatgcccagctaattttttgtactttggtagagatggggtttcaccatgttgcccaagctggtctcgaactcctgagctcaggaatccgcccacctcggccttccgaagtgttgggattacgggcgtaagtcaccatgcccagccaagaaagctattcttgaagtgtaaaacagccaggtgcaaaattattttggagtactttagtttgcttttgtttttagccaaagggatttcatactggtttaattatgttcatccttgagaatttttgagaagtttccaacagatttgtagttcattttgctgttgttacaatgtaaagctatatatagttgacccttgaacaacacaggttggaactgcaaggatccacttatacatggattttcttctgcctctgccacccttgagacggcaagaccaggccctccccttcctcctccttctcagcctactcagtatgaagacgacagagatgaaacacttatgatgatccacttctacttaatgagtagtaaatatattttcttttccttatgattttcttactattttctttagcttgctttattataagaatatagcatataatataaataaaatataaaatatgtgttaatggtctatttatgtcaccagtaaggcttccagtccacagtagtctattagtagttaggttttgggggaattatacgtggatttttgactgcatggggtgtcagcacctcatcccccacattgttcaaggttctactgtattttaatattaaaaaccaaacatgcattgagtaatta

SEQ ID NO: 22 - DNA, 4896 bp, Homo sapien
ttgctgtcaggtgactctcccgtggcgccatggcggaagcagaggagcaggaaactgggtcccttgaagaatctacagatgagtctgaggaagaagagagcgaagaggaacccaagctgaagtatgaaaggctttccaatggggtaactgaaatacttcagaaggatgcagctagctgcatgacagtccatgacaagtttttggcattgggcacacattatggcaaggtttatttacttgatgtccaggggaacatcactcagaagtttgatgtaagtcctgtgaagataaatcagattagcttggatgaaagtggagagcacatgggtgtgtgttcagaggatggcaaggtgcaggtatttggactgtattctggagaagaatttcacgagacttttgactgtcccattaaaattattgctgtgcacccacatttcgtgagatccagttgcaagcagtttgtgaccggagggaagaagctgctactgtttgaacggtcttggatgaacagatggaagtctgctgttctgcatgaaggggaagggaacataaggagtgtgaagtggagaggccatctgattgcttgggccaataatatgggtgtgaagatttttgacatcatctcaaagcaaagaatcaccaatgtgccccgggatgatataagtcttcgcccagacatgtatccctgcagcctctgctggaaggacaatgtgacactgattattggctgggggacttctgtcaaggtgtgctcagtgaaggaacggcatgccagtgaaatgagggatttgccaagtcgatatgttgaaatagtgtctcagtttgaaactgaattctacatcagtggacttgcacctctctgtgatcagcttgttgtactttcgtatgtaaaggagatttcagaaaaaacggaaagagaatactgtgccaggcctagactggacatcatccagccactttctgagacttgtgaagagatctcttctgatgctttgacagtcagaggctttcaggagaatgaatgtagagattatcatttagaatactctgaaggggaatcacttttttacatcgtgagtccgagagatgttgtagtggccaaggaacgagaccaagatgatcacattgactggctccttgaaaagaagaaatatgaagaagcattgatggcagctgaaattagccaaaaaaatattaaaagacataagattctggatattggcttggcatatataaatcacctggtggagagaggagactatgacatagcagcacgcaaatgccagaaaattcttgggaaaaatgcagcactctgggaatatgaagtttataaatttaaagaaattggacagcttaaggctattagtccttatttgccaagaggtgatccagttctgaaaccactcatctatgaaatgatcttacatgaatttttggagagtgattatgagggttttgccacattgatccgagaatggcctggagatctgtataataattcagtcatagttcaagcagttcgggatcatttgaagaaagatagtcagaacaagactttacttaaaaccctggcagaattgtacacctatgacaagaactatggcaatgctctggaaatatacttaacattaagacataaagacgtttttcagttgatccacaagcataatcttttcagttctatcaaggataaaattgttttattaatggattttgattcagagaaagctgttgacatgcttttggacaatgaagataaaatttcaattaaaaaggtagtggaagaattggaagacagaccagagctacagcatgtgtatttgcataagcttttcaagagagaccaccataaggggcagcgttaccatgaaaaacagatcagtctttatgctgaatatgatcgaccaaacttacttccctttctccgagacagtacccattgcccacttgaaaaggctcttgagatctgtcaacagagaaactttgtagaagagacagtttatcttctgagccgaatgggtaatagccgaagtgccctgaagatgattatggaggaattacatgatgttgataaagcaatcgaatttgccaaggagcaagatgatggagagctgtgggaagatttgattttatattccattgacaaaccaccatttattactggcttgttaaacaacattggcacacatgttgacccaattctactgattcaccgtattaaggaaggaatggagatccccaatttgagagattccttggttaaaattctgcaagactacaatttgcaaattctgcttcgtgaaggctgcaagaagattctcgtagctgactctttgtccttactgaagaaaatgcaccgaactcaaatgaaaggtgttcttgttgatgaggagaacatctgtgagtcgtgcctttcccctattcttccatcagatgcagctaagcccttcagcgtggtggtcttccattgccggcacatgttccacaaggagtgcctgcccatgcccagcatgaactctgctgcacagttctgcaacatctgcagtgctaagaaccgtggaccaggaagtgcaattttggagatgaaaaaatagctcatttctccttgtcagtctccttgtcaccactctttttgagactgtttttgcaacaacaaaagcatttgttgacactcgtgctgttaagagatttgtttatgtttatattatactcaaaaacaatttcttcatctattcctgtactaatggtttctctttgcagttcacagagaatttggggctctcttcatgccttgaaattttggggtccatagtgaatattttgttatttatttgtttggctcattctttatatagtaatggaaacataagtctaggagttagaaatgaattttttagaccttagtaaaaccatttaaccataaaatggacaactgagaattctcccagctgcctgaaagcgtcgccaactgtggttatcctgcaagctgctacctgcaacttggacgttgtttccacgtgctctgctggctacgattcttgcattctgggtttggcttttttctgtgtcatcaactatggttatcctctaaataggcatttaatgaaacattgtacaaattgtcactcatttgatgacacctgggaataacattagcaggctgatgtcctgcaccattatgtttactaatcacatgttctgtgtgctgtgacgactgtcaaagagtatctggccatggcggacactcagcatttgttgattgaataaatgttagctcttctcattgtgaaggactcacttttactgggataaacaaatgcagttaagaattctggcacccttgtaaggaagaaaagagagttcaacaccttcgagtctgagcgcttgtggctagagtttgccaggagggaggaaaccagtgaccctgaaaactgagggtgcctcaggagcagtgggaccacctgatgctgaaggacggactaatgatgtttcctcttgccttctctggtgcctccattgccctcatggaacagagcatatcatagagggagaaaagtcaaacttgtaattgtgtcttacagttactggcttcatcttccttgggatatatggtcatcctctaatgagtgtaaaagtgcgcaaaacacatccttattgttcctgatctcttagtcccataaatgggaacaaatacagctttctgcttctttctttttggggaaaggacagggtgctagtgagtactgacagcatgccagctaccgaagtcacccagccattcccatgagcagcagttcatttaattgtcacagcgtcgccaggaagaagatctgataaacctaggtttacagataaagaaagcaaaatgtagagatgttgttgaggtcacagaggtgactgcctaacttcagagcagggcttctgatccctttaagaaattacagggccagccgggcatggtggctcacgcccgtaatcccagggctttgggaggccttggcaggtggatcacctgagatcgcacgttcgagaccagcctgaccaacatggagaaaccccatctctactaaaaacacaaattggccaggcatggtggtgcatgcctgtaatcccagctactcaggaggctgaggcaggagaatcacttgaccccaggagacgtaggttgtggtgagctgagatcgcgccattgcactccagcctgggcaacaagagcaaaactccgtctcaaaaaagaaaagaaaagaaaagaaatcatagggccaagttcaaaggaaatgcacagaacatatcttcacattagagttaagaattctctagcaaacaacagatttttttgttgttgttagtcacaaatacttagaactggaaggctctttgttattattgaatgtacccctcagccttctcagcatttccttatcccaagactagtgtgctttctgctacactgctagttttcagttttgttcttacccaattgttttttcttttcaacattaccaatttacagattcagtttattacatttacattaatcctcacttatgatttgagcaagctcatttccagaaaagtttactttaagatcatcaataggatttgctaatttcagtgaagtcattttgcttcaggggtaaattatcctagttaccaagtcctatttggacataaagaaaatcctacttatagaaaaggagaaaataattaaacagtcttcatttttaagtaactgatttaaaaggaaaataataaaatatgttcgtttatcatttcagaaattgctgtaacacactggaaaattcctgaacaatatagattttatcgttaataaaaaacactagctttcgttccttagaatgtcttttcttttgaataaacagtattgggtgattt

SEQ ID NO: 23 - DNA, 3490 bp, Homo sapien
gcaaattcagagacacacataagaaactggaagaagagaaaggcaaaaaggaaaaagaaagacaggaaattgagaaagaacggagagaaagagagagggagcgtgaaagggaacgagaaaggcgagatcgtgaccgggatagagaaaggagctcagatcgtaataaggatcgcagtcgatcaagagaaaaaagcagagatcgtgaaagggaacgagagcgggaaagagagagagagagagaacgagagcgagaacgagaacgggagcgagagagagagcgagagagggaacgggagcgagaaaaaaaaaaaaaaaaaacggaagcagaggagcaggaaactgggtcccttgaagaatctacagatgagtctgaggaagaagagagcgaagaggaacccaagctgaagtatgaaaggctttccaatggggtaactgaaatacttcagaaggatgcagctagctgcatgacagtccatgacaagtttttggcattgggcacacattatggcaaggtttatttacttgatgtccaggggaacatcactcagaagtttgatgtagtgcaggtatttggactgtattctggagaagaatttcacgagacttttgactgtcccattaaaattattgctgtgcacccacatttcgtgagatccagttgcaagcagtttgtgaccggagggaagaagctgctactgtttgaacggtcttggatgaacagatggaagtctgctgttctgcatgaaggggaagggaacataaggagtgtgaagtggagaggccatctgattgcttgggccaataatatgggtgtgaagatttttgacatcatctcaaagcaaagaatcaccaatgtgccccgggatgatataagtcttcgcccagacatgtatccctgcagcctctgctggaaggacaatgtgacactgattattggctgggggacttctgtcaaggtgtgctcagtgaaggaacggcatgccagtgaaatgagggatttgccaagtcgatatgttgaaatagtgtctcagtttgaaactgaattctacatcagtggacttgcacctctctgtgatcagcttgttgtactttcgtatgtaaaggagatttcagaaaaaacggaaagagaatactgtgccaggcctagactggacatcatccagccactttctgagacttgtgaagagatctcttctgatgctttgacagtcagaggctttcaggagaatgaatgtagagattatcatttagaatactctgaaggggaatcacttttttacatcgtgagtccgagagatgttgtagtggccaaggaacgagaccaagatgatcacattgactggctccttgaaaagaagaaatatgaagaagcattgatggcagctgaaattagccaaaaaaatattaaaagacataagattctggatattggcttggcatatataaatcacctggtggagagaggagactatgacatagcagcacgcaaatgccagaaaattcttgggaaaaatgcagcactctgggaatatgaagtttataaatttaaagaaattggacagcttaaggctattagtccttatttgccaagaggtgatccagttctgaaaccactcatctatgaaatgatcttacatgaatttttggagagtgattatgagggttttgccacattgatccgagaatggcctggagatctgtataataattcagtcatagttcaagcagttcgggatcatttgaagaaagatagtcagaacaagactttacttaaaaccctggcagaattgtacacctatgacaagaactatggcaatgctctggaaatatacttaacattaagacataaagacgtttttcagttgatccacaagcataatcttttcagttctatcaaggataaaattgttttattaatggattttgattcagagaaagctgttgacatgcttttggacaatgaagataaaatttcaattaaaaaggtagtggaagaattggaagacagaccagagctacagcatgtgtatttgcataagcttttcaagagagaccaccataaggggcagcgttaccatgaaaaacagatcagtctttatgctgaatatgatcgaccaaacttacttccctttctccgagacagtacccattgcccacttgaaaaggctcttgagatctgtcaacagagaaactttgtagaagagacagtttatcttctgagccgaatgggtaatagccgaagtgccctgaagatgattatggaggaattacatgatgttgataaagcaatcgaatttgccaaggagcaagatgatggagagctgtgggaagatttgattttatattccattgacaaaccaccatttattactggcttgttaaacaacattggcacacatgttgacccaattctactgattcaccgtattaaggaaggaatggagatccccaatttgagagattccttggttaaaattctgcaagactacaatttgcaaattctgcttcgtgaaggctgcaagaagattctcgtagctgactctttgtccttactgaagaaaatgcaccgaactcaaatgaaaggtgttcttgttgatgaggagaacatctgtgagtcgtgcctttcccctattcttccatcagatgcagctaagcccttcagcgtggtggtcttccattgccggcacatgttccacaaggagtgcctgcccatgcccagcatgaactctgctgcacagttctgcaacatctgcagtgctaagaaccgtggaccaggaagtgcaattttggagatgaaaaaatagctcatttctccttgtcagtctccttgtcaccactctttttgagactgtttttgcaacaacaaaagcatttgttgacactcgtgctgttaagagatttgtttatgtttatattatactcaaaaacaatttcttcatctattcctgtactaatggtttctctttgcagttcacagagaatttggggctctcttcatgccttgaaattttggggtccatagtgaatattttgttatttatttgtttggctcattctttatatagtaatggaaacataagtctaggagttagaaatgaattttttagaccttagtaaaaccatttaaccataaaatggacaactgagaattctcccagctgcctgaaagcgtcgccaactgtggttatcctgcaagctgctacctgcaacttggacgttgtttccacgtgctctgctggctacgattcttgcattctgggtttggcttttttctgtgtcatcaactatggttatcctctaaataggcatttaatgaaacattgtacaaattgtcactcatttgatgacacctgggaataacattagcaggctgatgtcctgcaccattatgtttactaatcacatgttctgtgtgctgtgacgactgtcaaagagtatctggccatggcggacactcagcatttgttgattgaataaatgttagctcttc

SEQ ID NO: 24 - DNA, 6014 bp, Homo sapien
ttgctgtcaggtgactctcccgtggcgccatggcggaagcagaggagcaggaaactgggtcccttgaagaatctacagatgagtctgaggaagaagagagcgaagaggaacccaagctgaagtatgaaaggctttccaatggggtaactgaaatacttcagaaggatgcagctagctgcatgacagtccatgacaagtttttggcattgggcacacattatggcaaggtttatttacttgatgtccaggggaacatcactcagaagtttgatgtaagtcctgtgaagataaatcagattagcttggatgaaagtggagagcacatgggtgtgtgttcagaggatggcaaggtgcaggtatttggactgtattctggagaagaatttcacgagacttttgactgtcccattaaaattattgctgtgcacccacatttcgtgagatccagttgcaagcagtttgtgaccggagggaagaagctgctactgtttgaacggtcttggatgaacagatggaagtctgctgttctgcatgaaggggaagggaacataaggagtgtgaagtggagaggccatctgattgcttgggccaataatatgggtgtgaagatttttgacatcatctcaaagcaaagaatcaccaatgtgccccgggatgatataagtcttcgcccagacatgtatccctgcagcctctgctggaaggacaatgtgacactgattattggctgggggacttctgtcaaggtgtgctcagtgaaggaacggcatgccagtgaaatgagggatttgccaagtcgatatgttgaaatagtgtctcagtttgaaactgaattctacatcagtggacttgcacctctctgtgatcagcttgttgtactttcgtatgtaaaggagatttcagaaaaaacggaaagagaatactgtgccaggcctagactggacatcatccagccactttctgagacttgtgaagagatctcttctgatgctttgacagtcagaggctttcaggagaatgaatgtagagattatcatttagaatactctgaaggggaatcacttttttacatcgtgagtccgagagatgttgtagtggccaaggaacgagaccaagatgatcacattgactggctccttgaaaagaagaaatatgaagaagcattgatggcagctgaaattagccaaaaaaatattaaaagacataagattctggatattggcttggcatatataaatcacctggtggagagaggagactatgacatagcagcacgcaaatgccagaaaattcttgggaaaaatgcagcactctgggaatatgaagtttataaatttaaagaaattggacagcttaaggctattagtccttatttgccaagaggtgatccagttctgaaaccactcatctatgaaatgatcttacatgaatttttggagagtgattatgagggttttgccacattgatccgagaatggcctggagatctgtataataattcagtcatagttcaagcagttcgggatcatttgaagaaagatagtcagaacaagactttacttaaaaccctggcagaattgtacacctatgacaagaactatggcaatgctctggaaatatacttaacattaagacataaagacgtttttcagttgatccacaagcataatcttttcagttctatcaaggataaaattgttttattaatggattttgattcagagaaagctgttgacatgcttttggacaatgaagataaaatttcaattaaaaaggtagtggaagaattggaagacagaccagagctacagcatgtgtatttgcataagcttttcaagagagaccaccataaggggcagcgttaccatgaaaaacagatcagtctttatgctgaatatgatcgaccaaacttacttccctttctccgagacagtacccattgcccacttgaaaaggctcttgagatctgtcaacagagaaactttgtagaagagacagtttatcttctgagccgaatgggtaatagccgaagtgccctgaagatgattatggaggaattacatgatgttgataaagcaatcgaatttgccaaggagcaagatgatggagagctgtgggaagatttgattttatattccattgacaaaccaccatttattactggcttgttaaacaacattggcacacatgttgacccaattctactgattcaccgtattaaggaaggaatggagatccccaatttgagagattccttggttaaaattctgcaagactacaatttgcaaattctgcttcgtgaaggctgcaagaagattctcgtagctgactctttgtccttactgaagaaaatgcaccgaactcaaatgaaaggtgttcttgttgatgaggagaacatctgtgagtcgtgcctttcccctattcttccatcagatgcagctaagcccttcagcgtggtggtcttccattgccggcacatgttccacaaggagtgcctgcccatgcccagcatgaactctgctgcacagttctgcaacatctgcagtgctaagaaccgtggaccaggaagtgcaattttggagatgaaaaaatagctcatttctccttgtcagtctccttgtcaccactctttttgagactgtttttgcaacaacaaaagcatttgttgacactcgtgctgttaagagatttgtttatgtttatattatactcaaaaacaatttcttcatctattcctgtactaatggtttctctttgcagttcacagagaatttggggctctcttcatgccttgaaattttggggtccatagtgaatattttgttatttatttgtttggctcattctttatatagtaatggaaacataagtctaggagttagaaatgaattttttagaccttagtaaaaccatttaaccataaaatggacaactgagaattctcccagctgcctgaaagcgtcgccaactgtggttatcctgcaagctgctacctgcaacttggacgttgtttccacgtgctctgctggctacgattcttgcattctgggtttggcttttttctgtgtcatcaactatggttatcctctaaataggcatttaatgaaacattgtacaaattgtcactcatttgatgacacctgggaataacattagcaggctgatgtcctgcaccattatgtttactaatcacatgttctgtgtgctgtgacgactgtcaaagagtatctggccatggcggacactcagcatttgttgattgaataaatgttagctcttctcattgtgaaggactcacttttactgggataaacaaatgcagttaagaattctggcacccttgtaaggaagaaaagagagttcaacaccttcgagtctgagcgcttgtggctagagtttgccaggagggaggaaaccatgggaccacctgatgctgaaggacggactaatgatgtttcctcttgccttctctggtgcctccattgccctcatggaacagagcatatcatagagggagaaaagtcaaacttgtaattgtgtcttacagttactggcttcatcttccttgggatatatggtcatcctctaatgagtgtaaaagtgcgcaaaacacatccttattgttcctgatctcttagtcccataaatgggaacaaatacagctttctgcttctttctttttggggaaaggacagggtgctagtgagtactgacagcatgccagctaccgaagtcacccagccattcccatgagcagcagttcatttaattgtcacagcgtcgccaggaagaagatctgataaacctaggtttacagataaagaaagcaaaatgtagagatgttgttgaggtcacagaggtgactgcctaacttcagagcagggcttctgatccctttaagaaattacagggccagccgggcatggtggctcacgcccgtaatcccagggctttgggaggccttggcaggtggatcacctgagatcgcacgttcgagaccagcctgaccaacatggagaaaccccatctctactaaaaacacaaattggccaggcatggtggtgcatgcctgtaatcccagctactcaggaggctgaggcaggagaatcacttgaccccaggagacgtaggttgtggtgagctgagatcgcgccattgcactccagcctgggcaacaagagcaaaactccgtctcaaaaaagaaaagaaaagaaaagaaatcatagggccaagttcaaaggaaatgcacagaacatatcttcacattagagttaagaattctctagcaaacaacagatttttttgttgttgttagtcacaaatacttagaactggaaggctctttgttattattgaatgtacccctcagccttctcagcatttccttatcccaagactagtgtgctttctgctacactgctagttttcagttttgttcttacccaattgttttttcttttcaacattaccaatttacagattcagtttattacatttacattaatcctcacttatgatttgagcaagctcatttccagaaaagtttactttaagatcatcaataggatttgctaatttcagtgaagtcattttgcttcaggggtaaattatcctagttaccaagtcctatttggacataaagaaaatcctacttatagaaaaggagaaaataattaaacagtcttcatttttaagtaactgatttaaaaggaaaataataaaatatgttcgtttatcatttcagaaattgctgtaacacactggaaaattcctgaacaatatagattttatcgttaataaaaaacactagctttcgttccttagaatgtcttttcttttgaataaacagtattgggtgatttattaaaggatattcaatcctttttacttttcatcaacctataagggcttaaatatggcaaaataatccaagtgttagtcaattatttttcatgtgtgactagcccaatttaaaatataggtaaaaaggaaacccattcccctcgttttggggaagaacatagttgcaaagtacacacttcataagctattctttttttttttttttttttttttttttttgagatggagtctcgttctgttgccttggctggagtgcagtgacatgatcttggctcactgcaacctccgcctcccaggttcaagtgattctcccgtctcagcttccggagtgggtgggagtgcaggcacgcaccaccatgcccagctaattttttgtactttggtagagatggggtttcaccatgttgcccaagctggtctcgaactcctgagctcaggaatccgcccacctcggccttccgaagtgttgggattacgggcgtaagtcaccatgcccagccaagaaagctattcttgaagtgtaaaacagccaggtgcaaaattattttggagtactttagtttgcttttgtttttagccaaagggatttcatactggtttaattatgttcatccttgagaatttttgagaagtttccaacagatttgtagttcattttgctgttgttacaatgtaaagctatatatagttgacccttgaacaacacaggttggaactgcaaggatccacttatacatggattttcttctgcctctgccacccttgagacggcaagaccaggccctccccttcctcctccttctcagcctactcagtatgaagacgacagagatgaaacacttatgatgatccacttctacttaatgagtagtaaatatattttcttttccttatgattttcttactattttctttagcttgctttattataagaatatagcatataatataaataaaatataaaatatgtgttaatggtctatttatgtcaccagtaaggcttccagtccacagtagtctattagtagttaggttttgggggaattatacgtggatttttgactgcatggggtgtcagcacctcatcccccacattgttcaaggttctactgtattttaatattaaaaaccaaacatgcattgagtaatta

SEQ ID NO: 25 - DNA, 3301 bp, Homo sapien
ttgctgtcaggtgactctcccgtggcgccatggcggaagcagaggagcaggaaactgggtcccttgaagaatctacagatgagtctgaggaagaagagagcgaagaggaacccaagctgaagtatgaaaggctttccaatggggtaactgaaatacttcagaaggatgcagctagctgcatgacagtccatgacaagtttttggcattgggcacacattatggcaaggtttatttacttgatgtccaggggaacatcactcagaagtttgatgtaagtcctgtgaagataaatcagattagcttggatgaaagtggagagcacatgggtgtgtgttcagaggatggcaaggtgcaggtatttggactgtattctggagaagaatttcacgagacttttgactgtcccattaaaattattgctgtgcacccacatttcgtgagatccagttgcaagcagtttgtgaccggagggaagaagctgctactgtttgaacggtcttggatgaacagatggaagtctgctgttctgcatgaaggggaagggaacataaggagtgtgaagtggagaggccatctgattgcttgggccaataatatgggtgtgaagatttttgacatcatctcaaagcaaagaatcaccaatgtgccccgggatgatataagtcttcgcccagacatgtatccctgcagcctctgctggaaggacaatgtgacactgattattggctgggggacttctgtcaaggtgtgctcagtgaaggaacggcatgccagtgaaatgagggatttgccaagtcgatatgttgaaatagtgtctcagtttgaaactgaattctacatcagtggacttgcacctctctgtgatcagcttgttgtactttcgtatgtaaaggagatttcagaaaaaacggaaagagaatactgtgccaggcctagactggacatcatccagccactttctgagacttgtgaagagatctcttctgatgctttgacagtcagaggctttcaggagaatgaatgtagagattatcatttagaatactctgaaggggaatcacttttttacatcgtgagtccgagagatgttgtagtggccaaggaacgagaccaagatgatcacattgactggctccttgaaaagaagaaatatgaagaagcattgatggcagctgaaattagccaaaaaaatattaaaagacataagattctggatattggcttggcatatataaatcacctggtggagagaggagactatgacatagcagcacgcaaatgccagaaaattcttgggaaaaatgcagcactctgggaatatgaagtttataaatttaaagaaattggacagcttaaggctattagtccttatttgccaagaggtgatccagttctgaaaccactcatctatgaaatgatcttacatgaatttttggagagtgattatgagggttttgccacattgatccgagaatggcctggagatctgtataataattcagtcatagttcaagcagttcgggatcatttgaagaaagatagtcagaacaagactttacttaaaaccctggcagaattgtacacctatgacaagaactatggcaatgctctggaaatatacttaacattaagacataaagacgtttttcagttgatccacaagcataatcttttcagttctatcaaggataaaattgttttattaatggattttgattcagagaaagctgttgacatgcttttggacaatgaagataaaatttcaattaaaaaggtagtggaagaattggaagacagaccagagctacagcatgtgtatttgcataagcttttcaagagagaccaccataaggggcagcgttaccatgaaaaacagatcagtctttatgctgaatatgatcgaccaaacttacttccctttctccgagacagtacccattgcccacttgaaaaggctcttgagatctgtcaacagagaaactttgtagaagagacagtttatcttctgagccgaatgggtaatagccgaagtgccctgaagatgattatggaggaattacatgatgttgataaagcaatcgaatttgccaaggagcaagatgatggagagctgtgggaagatttgattttatattccattgacaaaccaccatttattactggcttgttaaacaacattggcacacatgttgacccaattctactgattcaccgtattaaggaaggaatggagatccccaatttgagagattccttggttaaaattctgcaagactacaatttgcaaattctgcttcgtgaaggctgcaagaagattctcgtagctgactctttgtccttactgaagaaaatgcaccgaactcaaatgaaaggtgttcttgttgatgaggagaacatctgtgagtcgtgcctttcccctattcttccatcagatgcagctaagcccttcagcgtggtggtcttccattgccggcacatgttccacaaggagtgcctgcccatgcccagcatgaactctgctgcacagttctgcaacatctgcagtgctaagaaccgtggaccaggaagtgcaattttggagatgaaaaaatagctcatttctccttgtcagtctccttgtcaccactctttttgagactgtttttgcaacaacaaaagcatttgttgacactcgtgctgttaagagatttgtttatgtttatattatactcaaaaacaatttcttcatctattcctgtactaatggtttctctttgcagttcacagagaatttggggctctcttcatgccttgaaattttggggtccatagtgaatattttgttatttatttgtttggctcattctttatatagtaatggaaacataagtctaggagttagaaatgaattttttagaccttagtaaaaccatttaaccataaaatggacaactgagaattctcccagctgcctgaaagcgtcgccaactgtggttatcctgcaagctgctacctgcaacttggacgttgtttccacgtgctctgctggctacgattcttgcattctgggtttggcttttttctgtgtcatcaactatggttatcctctaaataggcatttaatgaaacattgtacaaattgtcactcatttgatgacacctgggaataacattagcaggctgatgtcctgcaccattatgtttactaatcacatgttctgtgtgctgtgacgactgtcaaagagtatctggccatggcggacactcagcatttgttgattgaataaatgttagctcttcaaaaaaagtcgacgcggccgc

SEQ ID NO: 26 - DNA, 2956 bp, Homo sapien
ttgctgtcaggtgactctcccgtggcgccatggcggaagcagaggagcaggaaactgggtcccttgaagaatctacagatgagtctgaggaagaagagagcgaagaggaacccaagctgaagtatgaaaggctttccaatggggtaactgaaatacttcagaaggatgcagctagctgcatgacagtccatgacaagtttttggcattgggcacacattatggcaaggtttatttacttgatgtccaggggaacatcactcagaagtttgatgtaagtcctgtgaagataaatcagattagcttggatgaaagtggagagcacatgggtgtgtgttcagaggatggcaaggtgcaggtatttggactgtattctggagaagaatttcacgagacttttgactgtcccattaaaattattgctgtgcacccacatttcgtgagatccagttgcaagcagtttgtgaccggagggaagaagctgctactgtttgaacggtcttggatgaacagatggaagtctgctgttctgcatgaaggggaagggaacataaggagtgtgaagtggagaggccatctgattgcttgggccaataatatgggtgtgaagatttttgacatcatctcaaagcaaagaatcaccaatgtgccccgggatgatataagtcttcgcccagacatgtatccctgcagcctctgctggaaggacaatgtgacactgattattggctgggggacttctgtcaaggtgtgctcagtgaaggaacggcatgccagtgaaatgagggatttgccaagtcgatatgttgaaatagtgtctcagtttgaaactgaattctacatcagtggacttgcacctctctgtgatcagcttgttgtactttcgtatgtaaaggagatttcagaaaaaacggaaagagaatactgtgccaggcctagactggacatcatccagccactttctgagacttgtgaagagatctcttctgatgctttgacagtcagaggctttcaggagaatgaatgtagagattatcatttagaatactctgaaggggaatcacttttttacatcgtgagtccgagagatgttgtagtggccaaggaacgagaccaagatgatcacattgactggctccttgaaaagaagaaatatgaagaagcattgatggcagctgaaattagccaaaaaaatattaaaagacataagattctggatattggcttggcatatataaatcacctggtggagagaggagactatgacatagcagcacgcaaatgccagaaaattcttgggaaaaatgcagcactctgggaatatgaagtttataaatttaaagaaattggacagcttaaggctattagtccttatttgccaagaggtgatccagttctgaaaccactcatctatgaaatgatcttacatgaatttttggagagtgattatgagggttttgccacattgatccgagaatggcctggagatctgtataataattcagtcatagttcaagcagttcgggatcatttgaagaaagatagtcagaacaagactttacttaaaaccctggcagaattgtacacctatgacaagaactatggcaatgctctggaaatatacttaacattaagacataaagacgtttttcagttgatccacaagcataatcttttcagttctatcaaggataaaattgttttattaatggattttgattcagagaaagctgttgacatgcttttggacaatgaagataaaatttcaattaaaaaggtagtggaagaattggaagacagaccagagctacagcatgtgtatttgcataagcttttcaagagagaccaccataaggggcagcgttaccatgaaaaacagatcagtctttatgctgaatatgatcgaccaaacttacttccctttctccgagacagtacccattgcccacttgaaaaggctcttgagatctgtcaacagagaaactttgtagaagagacagtttatcttctgagccgaatgggtaatagccgaagtgccctgaagatgattatggaggaattacatgatgttgataaagcaatcgaatttgccaaggagcaagatgatggagagctgtgggaagatttgattttatattccattgacaaaccaccatttattactggcttgttaaacaacattggcacacatgttgacccaattctactgattcaccgtattaaggaaggaatggagatccccaatttgagagattccttggttaaaattctgcaagactacaatttgcaaattctgcttcgtgaaggctgcaagaagattctcgtagctgactctttgtccttactgaagaaaatgcaccgaactcaaatgaaaggtgttcttgttgatgaggagaacatctgtgagtcgtgcctttcccctattcttccatcagatgcagctaagcccttcagcgtggtggtcttccattgccggcacatgttccacaaggagtgcctgcccatgcccagcatggttggaactgcaaggatccacttatacatggattttcttctgcctctgccacccttgagacggcaagaccaggccctccccttcctcctccttctcagcctactcagtatgaagacgacagagatgaaacacttatgatgatccacttctacttaatgagtagtaaatatattttcttttccttatgattttcttactattttctttagcttgctttattataagaatatagcatataatataaataaaatataaaatatgtgttaatggtctatttatgtcaccagtaaggcttccagtccacagtagtctattagtagttaggttttgggggaattatacgtggatttttgactgcatggggtgtcagcacctcatcccccacattgttcaaggttctactgtattttaatattaaaaaccaaacatgcattgagtaatta

SEQ ID NO: 27 - DNA, 2678 bp, Homo sapien
ttgctgtcaggtgactctcccgtggcgccatggcggaagcagaggagcaggaaactgggtcccttgaagaatctacagatgagtctgaggaagaagagagcgaagaggaacccaagctgaagtatgaaaggctttccaatggggtaactgaaatacttcagaaggatgcagctagctgcatgacagtccatgacaagtttttggcattgggcacacattatggcaaggtttatttacttgatgtccaggggaacatcactcagaagtttgatgtaagtcctgtgaagataaatcagattagcttggatgaaagtggagagcacatgggtgtgtgttcagaggatggcaaggtgcaggtatttggactgtattctggagaagaatttcacgagacttttgactgtcccattaaaattattgctgtgcacccacatttcgtgagatccagttgcaagcagtttgtgaccggagggaagaagctgctactgtttgaacggtcttggatgaacagatggaagtctgctgttctgcatgaaggggaagggaacataaggagtgtgaagtggagaggccatctgattgcttgggccaataatatgggtgtgaagatttttgacatcatctcaaagcaaagaatcaccaatgtgccccgggatgatataagtcttcgcccagacatgtatccctgcagcctctgctggaaggacaatgtgacactgattattggctgggggacttctgtcaaggtgtgctcagtgaaggaacggcatgccagtgaaatgagggatttgccaagtcgatatgttgaaatagtgtctcagtttgaaactgaattctacatcagtggacttgcacctctctgtgatcagcttgttgtactttcgtatgtaaaggagatttcagaaaaaacggaaagagaatactgtgccaggcctagactggacatcatccagccactttctgagacttgtgaagagatctcttctgatgctttgacagtcagaggctttcaggagaatgaatgtagagattatcatttagaatactctgaaggggaatcacttttttacatcgtgagtccgagagatgttgtagtggccaaggaacgagaccaagatgatcacattgactggctccttgaaaagaagaaatatgaagaagcattgatggcagctgaaattagccaaaaaaatattaaaagacataagattctggatattggcttggcatatataaatcacctggtggagagaggagactatgacatagcagcacgcaaatgccagaaaattcttgggaaaaatgcagcactctgggaatatgaagtttataaatttaaagaaattggacagcttaaggctattagtccttatttgccaagaggtgatccagttctgaaaccactcatctatgaaatgatcttacatgaatttttggagagtgattatgagggttttgccacattgatccgagaatggcctggagatctgtataataattcagtcatagttcaagcagttcgggatcatttgaagaaagatagtcagaacaagactttacttaaaaccctggcagaattgtacacctatgacaagaactatggcaatgctctggaaatatacttaacattaagacataaagacgtttttcagttgatccacaagcataatcttttcagttctatcaaggataaaattgttttattaatggattttgattcagagaaagctgttgacatgcttttggacaatgaagataaaatttcaattaaaaaggtagtggaagaattggaagacagaccagagctacagcatgtgtatttgcataagcttttcaagagagaccaccataaggggcagcgttaccatgaaaaacagatcagtctttatgctgaatatgatcgaccaaacttacttccctttctccgagacagtacccattgcccacttgaaaaggctcttgagatctgtcaacagagaaactttgtagaagagacagtttatcttctgagccgaatgggtaatagccgaagtgccctgaagatgattatggaggaattacatgatgttgataaagcaatcgaatttgccaaggagcaagatgatggagagctgtgggaagatttgattttatattccattgacaaaccaccatttattactggcttgttaaacaacattggcacacatgttgacccaattctactgattcaccgtattaaggaaggaatggagatccccaatttgagagattccttggttaaaattctgcaagactacaatttgcaaattctgcttcgtgaaggctgcaagaagattctcgtagctgactctttgtccttactgaagaaaatgcaccgaactcaaatgaaaggtgttcttgttgatgaggagaacatctgtgagtcgtgcctttcccctattcttccatcagatgcagctgaaaacaatggaactggaaaatcttgtcttttagaaaagaaattaatcccaactatctctcttgcctaaaagataaatataggtaaacccaaggaaaggggaatttagtttctctacatgtcatttcggtctccaaactccctgttggctttttaatgcaattttaattgttggaataaaaaagtcccaagggtgttttgttactgttttctccatgaataaactcccttggtttta

SEQ ID NO: 28 - DNA, 2146 bp, Homo sapien
ttgctgtcaggtgactctcccgtggcgccatggcggaagcagaggagcaggaaactgggtcccttgaagaatctacagatgagtctgaggaagaagagagcgaagaggaacccaagctgaagtatgaaaggctttccaatggggtaactgaaatacttcagaaggatgcagctagctgcatgacagtccatgacaagtttttggcattgggcacacattatggcaaggtttatttacttgatgtccaggggaacatcactcagaagtttgatgtaagtcctgtgaagataaatcagattagcttggatgaaagtggagagcacatgggtgtgtgttcagaggatggcaaggtgcaggtatttggactgtattctggagaagaatttcacgagacttttgactgtcccattaaaattattgctgtgcacccacatttcgtgagatccagttgcaagcagtttgtgaccggagggaagaagctgctactgtttgaacggtcttggatgaacagatggaagtctgctgttctgcatgaaggggaagggaacataaggagtgtgaagtggagaggccatctgattgcttgggccaataatatgggtgtgaagatttttgacatcatctcaaagcaaagaatcaccaatgtgccccgggatgatataagtcttcgcccagacatgtatccctgcagcctctgctggaaggacaatgtgacactgattattggctgggggacttctgtcaaggtgtgctcagtgaaggaacggcatgccagtgaaatgagggatttgccaagtcgatatgttgaaatagtgtctcagtttgaaactgaattctacatcagtggacttgcacctctctgtgatcagcttgttgtactttcgtatgtaaaggagatttcagaaaaaacggaaagagaatactgtgccaggcctagactggacatcatccagccactttctgagacttgtgaagagatctcttctgatgctttgacagtcagaggctttcaggagaatgaatgtagagattatcatttagaatactctgaaggggaatcacttttttacatcgtgagtccgagagatgttgtagtggccaaggaacgagaccaagatgatcacattgactggctccttgaaaagaagaaatatgaagaagcattgatggcagctgaaattagccaaaaaaatattaaaagacataagattctggatattggcttggcatatataaatcacctggtggagagaggagactatgacatagcagcacgcaaatgccagaaaattcttgggaaaaatgcagcactctgggaatatgaagtttataaatttaaagaaattggacagcttaaggctattagtccttatttgccaagaggtgatccagttctgaaaccactcatctatgaaatgatcttacatgaatttttggagagtgattatgagggttttgccacattgatccgagaatggcctggagatctgtataataattcagtcatagttcaagcagttcgggatcatttgaagaaagatagtcagaacaagactttacttaaaaccctggcagaattgtgagtatacttaagtgtttctttttccatatcagtctgtgttgaaaagtttttcatactttagatttggcaaactccaagtggagaagatgtattttataccattttcctacattccttcttagtaaaaacctctcataaacctcaaatgagtaggcgataaggacatgtgtgaaactgtacaattgcaatgtaatctgtttcccagagaagagaacccctaacgcacagcgcttgggagaggcagtggttaggaaacaaaagggtgccaagttttagatcactcaagcataacagtttcccaatgagcaaggctctggattctgctcttctagggtcttcaagtcagttaatttaatctctcaaatgtcaattccttatgggaaaattttaaactttaaaagagatgtcataatagaggactccctgaccctgagtcagggctcagaaaatggcagcttggttaatatttttcatatttcttgggcacattcagtgatgcaggctttgtgcgagacgcttatgatacagagatagataagatatgctctcaagtacttcgatcta

SEQ ID NO: 29 - DNA, 1132 bp, Homo sapien
ttgctgtcaggtgactctcccgtggcgccatggcggaagcagaggagcaggaaactgggtcccttgaagaatctacagatgagtctgaggaagaagagagcgaagaggaacccaagctgaagtatgaaaggctttccaatggggtaactgaaatacttcagaaggatgcagctagctgcatgacagtccatgacaagtttttggcattgggcacacattatggcaaggtttatttacttgatgtccaggggaacatcactcagaagtttgatgtaagtcctgtgaagataaatcagattagcttggatgaaagtggagagcacatgggtgtgtgttcagaggatggcaaggtgcaggtatttggactgtattctggagaagaatttcacgagacttttgactgtcccattaaaattattgctgtgcacccacatttcgtgagatccagttgcaagcagtttgtgaccggagggaagaagctgctactgtttgaacggtcttggatgaacagatggaagtctgctgttctgcatgaaggggaagggaacataaggagtgtgaagtggagaggccatctgattgcttgggccaataatatgggtgtgaagatttttgacatcatctcaaagcaaagaatcaccaatgtgccccgggatgatataagtcttcgcccagacatgtatccctgcagcctctgctggaaggacaatgtgacactgattattggctgggggacttctgtcaaggtgtgctcagtgaaggaacggcatgccagtgaaatgagggatttgccaagtcgatatgttgaaatagtgtctgctgatcctgttgtgaaatgatacggatggtattcactgcacatatgatgaaatcatcagaattgttaaaacttttgccagtggaatggataaactattgatgaattgtttcctgggtcacatctctggaaaatagatgttacagttcttaaaggcagtgctttaaagtgaagttcattctgtttccaaaggctctactttcaaaggttaagaatgagattttaaaattggatttttgcctggacttgagggtacaagatgtttctatttgaagtgaagttataaaagggcaaatccagattcataaactatca

SEQ ID NO: 30 - DNA, 286 bp, Homo sapien
tttattcccaagttctttatttcaatgtgtttattttaaccacaaaagtacaaggcttttccatctagttggaacagcagagattcatttaactgaggcttttcatatgaaaaatgagaacaaggcccaaagaagtaaaaagacttgtctacaggagagtgcctctgaggaccaacaggaaacagagaacttgcagaattctttgcttattcagaagataattcagaattccacaatgcctcaaagtgatcaatataaatttgaagtattactaaagactaaagca

SEQ ID NO: 31 - DNA, 286 bp, Homo sapien; identical to SEQ ID NO: 30

SEQ ID NO: 32 - DNA, 738 bp, Homo sapien
gcaggtttcagatgaaatttctgtatttccaaaaaaccccttccttgatagcctctctttctactccattccatttctagtttctttttcagtgtttaacatgatgtggttcttggggtttgatcagagcaggaggaagatgggtcctgcatggtttccggcaagcaggctgtgtggacaggactcagctctggggaatgtcctggtgcagcctgaggcaaagcctgtgtggcccccgtgtctcacgggcagacaaagctgatctggggtgccaggaagacccagaatgtggcggggaggggaggggaggatgaggccaaagggcctcacagtcctgtttgagacagaacctataccctgagaagacactaggtgggcaatacaatgaaacatgacacattatagagaaaagcacgtttctcaagaatgcatacaaatagacacacttaagaaacacactggaatacttgcctggggtagggggaggactctaggtataacatgcaaaataattagtgaaagcaagatagagaaccaccttctgagccacaaagccaagtgtcacagtgttagggaaatgtggacggagcaaaggaggttggcaggaagatgctcccaagcaccttccataaatcacacccaatgctgtctccatctggtaccgggctctcaaaggttgtagttctttaaataactaaatattttcattaattattaataataatgttatggcaataa

SEQ ID NO: 33 - DNA, 738 bp, Homo sapien; identical to SEQ ID NO: 32

SEQ ID NO: 34 - DNA, 1819 bp, Homo sapien
  misc_feature (1176)..(1255): n=a,c,g or t
  misc_feature (1720)..(1720): n=a,c,g or t
ggcgataaagggctaatttcatataccgagtatcttttcttgcttacaatcctcactaaaccccattctggatttcatgttgcttttaaaatgctggatacagatggtaatgagatgattgaaaaaagggaattttttaagctgcagaagatcataagtaaacaagatgacttgatgacagtgaaaactaatgaaactggatatcaggaagcaatagtgaaagaacctgaaattaacacaactcttcagatgcgtttctttggaaaaagaggacaaagaaaacttcattataaagaatttcgaagatttatggaaaatttacaaacagagattcaagaaatggaattccttcagttttctaaaggtttgagtttcatgagaaaagaagactttgcagagtggctactttttttcactaacactgaaaataaagatatttattggaaaaatgtgagagagaagttgtcagcaggagaggttggtatacccttttattatgcatgtgataaagatgaaataataagttagacatgtttacataaagtaacttctgaattaaccaagactgtgctaccctcgatggtatataaaatcaacttgaggaatgttctctacatgctcttctcctgtaaaggaaaactactgcctaagacagaatcagtgtagcaattacaagttttccatttccagtaaagtcaagaataagacaagtatcactactgttatttaatatcactctgtaaatcttaaccagtccaaattaacaagattatttaaaagagtataaaaatgtgaaagggggtagtagttgtctttgtttttatatgatgcaattatatgcctagagaacccaagagaatccagtagaaaaaccgtagaaacaataagaattcaataaagtacctgtcacaatgctaatatataagcagcagcagctctcctatatacaaattacaagtagaaaatgtaatgacatgcatatgtgtgtgtatatatatacgagatgtatgaaatgatgattgccaagctattaataattattcatgtacagtgatgaggtttcaagtgatttttactttctttctttatacctttatgtattgttcccaaaaaatgtttacaatggacatgtattttatgtgaactttttaaaaagttacttctattgtaagaaannnnnnnnnnnnnnnnnnnnnnnnnnnnnnnnnnnnnnnnnnnnnnnnnnnnnnnnnnnnnnnnnnnnnnnnnnnnnnnnagaagaaaacttgatagccttgatggatataaaaagaaaacttatctaattataagacatcccctattattgaatagaaagtcttagaattataaatacagcaattctgtcttcagttagtctataagtgtaatggttatattagaacagcccaagtttactgcagttacaaattaaccctgaaatccccctgtctgacgctgagtttcttgctcagtcatgccgcagttccattgtgggctgataggagtctctgtccgcatagaggtctagacccattcaggggtctagactctctgaggctgtgccatcttggagttacatcatctgaaagaagtaccacgctcagaggctgtggcaggaaaagaaggaggggagtcaaaatccagcaactaaatgttttggcctggaaacatcacatgacacttggctattggccagactaatcacataaccccacctgantgcagggaggcaaggaacttcagtctttcgtacgtgcaggaatcagaaaagatccagatactggtgaatactcgtgggtttcaataaaaataccattga

SEQ ID NO: 35 - DNA, 1817 bp, Homo sapien
aggagagagagagagaatatggtactattcatgaaaataaagctatttacaacttagaaaagcaattccatttcctgcaacaaacataacttagggaaaaataaatattattttcattagcaaacatattaatattttataagcttgcagttatccaacacccataaatatattccgggaaattaagccagtcttttcagttcacaattgagtgtacctgggagtctccttgccctttctcagaagacattaaaaagaaaagctgtaaatcagtcataagaaaaagaacatatataatctggagtagaattttgcttccacttggctaattttcatcagtgctatgctcctgtggtcccccggatccaaatatttcctaacctttaccttttcattttgttgagagtagtagtaatccacatgtatttttagctaacaaaacacgtccatgaattagattatttcttgaagcttttcatcaaatattttgtggccttttttttttttaattttagccaatgttaaatcaaagctttaggcttataattgtattctacatagctaaacaaagttcaccagaaaaaaagggaaagattataaaacattataaaaggaaaacattataaagtaattaaattttaaagccagtatgtgaaagaagagatggcccaaagtcttcattaccctcttagagaagaaactccattaatgtgtgctcagtctggttccactccctagtaaccttaagcatagttacattcactttttgtcttttacccccattttcagttctgttgtgatcatcttttacaacataattcaccctcaactatttttggaggagtgtgggaaggaaataaacagtaacgtaaagtatatatgaaatcatgtttaaccttgaagacaatgaccccttgatttttactttcggttaacaggtaccacaacatcagagtatacaagaatactggaagtgtgtgaagaaagaaagcattaaaggagtaaaagaagtctggaaacaagctggaaaaggtcttttttaataaaagatataatagtatggcaattatattgttccaaatgtcaaaatttgtgattttttagaagtacttgctatttatcttcttaagtcttcattgatattctgtgtgaaataagcatgtcttgtacttgctttctgattcataattttatgaaagaacttagtagaaagaaaagtaagtataaaaatagatattggattctgtcagaaggcctagatttgaaataatgttttgtacttcggtaagatggaaaacttagtgattcactgatttcttagacactctaatatgatatgctttctggaaggataaaacaaatacatatgggaaaaagtacttgagaccaaggccagcatcaattccagacatcttcatgttcctaataggctaaatgaagttaaaaacttatttcagatttttctcatctgtaccttatatctcataaatttattgcatattttatgtcagtagcttagctgtttattgtctttaaaataacatgtaaacttcaatgttctatctggaagcagaataaaatatttacatagatacaaaaaaaaaaaagaaaaaaaaaaaattggggggggccccgcggccctcgaaagagcttccgaaccatcgcggtggggcgcgggccccatagtgtaagggcacacgtggcccaagacggtccccaggaaacccgggccagacagagcggcggattccacaaataaaaaaccgcgggagacccgacgttctgaacacacgacagggccaggcaacggtgctaca

SEQ ID NO: 36 - DNA, 629 bp, Homo sapien
ttttttgggtcgccagttattgtaaacggcctgagctgcgagcgcgggccacgtgtggatgtccaacacwrgcgccccgccacccccgcagcagcccccacaggccccacaagcagcaggcgccccgccacccccgccttgctatttatcttcttaagtcttcattgatattctgtgtgaaataagcatgtcttgtacttgctttctgattcataattttatgaaagaacttagtagaaagaaaagtaagtataaaaatagatattggattctgtcagaaggcctagatttgaaataatgttttgtacttcggtaagatggaaaacttagtgattcactgatttcttagacactctaatatgatatgctttctggaaggataaaacaaatacatatgggaaaaagtacttgagaccaaggccagcatcaattccagacatcttcatgttcctaataggctaaatgaagttaaaaacttatttcagatttttctcatctgtaccttatatctcataaatttattgcatattttatgtcagtagcttagctgtttattgtctttaaaataacatgtaaacttcaatgttctatctggaagcagaataaaatatttacatagatacaaaaaa

SEQ ID NO: 37 - DNA, 405 bp, Homo sapien
cgcgcccgcaccgtttgttttatttgtaagtgctcagattttgaagtcagatggaccaaggttcagatcctgattgttccagttagtagactttgggcaaactacataacccctgaagcgttacttacctaagacttagagaggctaaggtcatacacgttataaagggcagaaccggaatttcagcattaaaagtccatctaactccaaaactctgtgctcttactcagtgctatgtccactaataaaacttagcagaagtggaccacttaacagagtatgttagtctcttcaagctgccacctcaaaacaccacaggctgaggcgggagaattggatgaacctgggagacaaaggttgcagtgagccaaggtcacacctgggcaacagtgagactctgtctca

SEQ ID NO: 38 - DNA, 1823 bp, Homo sapien
cgcgagagttcccaagcggtaggcggcggcgccgggagagaagcgccgtctagctgcgcttccgcaaagatggcggcggctgcgggtagctgcgcgcgggtggcggcctggggcggaaaactgcgacgggggctcgctgtcagccgacaggctgtgcggagtcccggccccttggcagcggcagtggccggcgcggccctggcaggagcaggagcggcctggcaccacagccgcgtcagtgttgcggcgcgggatggcagttttacagtctccgcacagaaaaatgttgaacatggaataatatatattgggaaaccgtctcttcgtaagcagcgcttcatgcagttttcttcactcgaacatgaaggagaatattatatgacaccacgagacttcctcttctcagtgatgtttgagcaaatggaacgtaaaacttcagtcaagaagctgacaaaaaaggacatcgaggatacactgtcagggatccaaacagctggctgtggatcaacttttttcagagaccttggcgataaagggctaatttcatataccgagtatcttttcttgcttacaatcctcactaaaccccattctggatttcatgttgcttttaaaatgctggatacagatggtaatgagatgattgaaaaaagggaattttttaagctgcagaagatcataagtaaacaagatgacttgatgacagtgaaaactaatgaaactggatatcaggaagcaatagtgaaagaacctgaaattaacacaactcttcagatgcgtttctttggaaaaagaggacaaagaaaacttcattataaagaatttcgaagatttatggaaaatttacaaacagagattcaagaaatggaattccttcagttttctaaaggtttgagtttcatgagaaaagaagactttgcagagtggctactttttttcactaacactgaaaataaagatatttattggaaaaatgtgagagagaagttgtcagcaggagagcggagtttaagagagctgtgaaagtagcaacaggacaagaactctcaaacaatattttggacactgtctttaagatctttgatttggatggtgatgaatgtcttagtcatgaagagtttcttggggtgttaaaaaacagaatgcatcgaggtttatgggtaccacaacatcagagtatacaagaatactggaagtgtgtgaagaaagaaagcattaaaggagtaaaagaagtctggaaacaagctggaaaaggtcttttttaataaaagatataatagtatggcaattatattgttccaaatgtcaaaatttgtgattttttagaagtacttgctatttatcttcttaagtcttcattgatattctgtgtgaaataagcatgtcttgtacttgctttctgattcataattttatgaaagaacttagtagaaagaaaagtaagtataaaaatagatattggattctgtcagaaggcctagatttgaaataatgttttgtacttcggtaagatggaaaacttagtgattcactgatttcttagacactctaatatgatatgctttctggaaggataaaacaaatacatatgggaaaaagtacttgagaccaaggccagcatcaattccagacatcttcatgttcctaataggctaaatgaagttaaaaacttatttcagatttttctcatctgtaccttatatctcataaatttattgcatattttatgtcagtagcttagctgtttattgtctttaaaataacatgtaaacttcaatgttctatctggaagcagaataaaatatttacatagatacaaaaaa

SEQ ID NO: 39 - DNA, 2038 bp, Homo sapien
atttgaatttctaaactaagggaaactaatttaggtggggaaaaaaatcagaactgtctctgtgggaacaagaataaaagagaaaccaggattgactgggaagagacacaaagaaactttgtcaaaattggctgatatttgtacattttaatatatgtattttttcctgaagagctgtaaataataattgggaggggaacagggagcaggtagaggtatagaagagccaggaatagcagaatactggtaattattgaagattaataatgtttacatggtgacttgttcgtagaattctgttcattttacttaagtttgaaattttctgtaataaaaatttgtaagaggttccaggggaataagcacagggagaaatgtgtggatattgaacttggcattatatcatttgattgtcaactttaaaaataaaaggtaaaataaatataaagctttttaacttttttcccaaaaataattaagtaggggaaaggggggtattgaaaactggctgagagatttagagaactagaaataaaccacttgcctaaaacaaacgtaatagaaatagctaaattcaaaataattaatacggaattaattgcagcagttttcaaactgttaaatagcccagaaaaaaatggatagaggtttgtctcctaattgatttgaatccatagtttgggattttgtctacatctgattcttttaaaatgctttcttttttaaatttgctttccatatgaggattgatacaattgattctgaaaggcagctgcagaagatcataagtaaacaagatgacttgatgacagtgaaaactaatgaaactggatatcaggaagcaatagtgaaagaacctgaaattaacacaactcttcagatgcgtttctttggaaaaagaggacaaagaaaacttcattataaagaatttcgaagatttatggaaaatttacaaacagagattcaagaaatggaattccttcagttttctaaaggtttgagtttcatgagaaaagaagactttgcagagtggctactttttttcactaacactgaaaataaagatatttattggaaaaatgtgagagagaagttgtcagcaggagagagcattagtttggatgaattcaagtcattttgccattttacaacccacttggaagactttgctattgccatgcagatgttcagtttagctcatcgtcctgtcagactagcggagtttaagagagctgtgaaagtagcaacaggacaagaactctcaaacaatattttggacactgtctttaagatctttgatttggatggtgatgaatgtcttagtcatgaagagtttcttggggtgttaaaaaacagaatgcatcgaggtttatgggtaccacaacatcagagtatacaagaatactggaagtgtgtgaagaaagaaagcattaaaggagtaaaagaagtctggaaacaagctggaaaaggtcttttttaataaaagatataatagtatggcaattatattgttccaaatgtcaaaatttgtgattttttagaagtacttgctatttatcttcttaagtcttcattgatattctgtgtgaaataagcatgtcttgtacttgctttctgattcataattttatgaaagaacttagtagaaagaaaagtaagtataaaaatagatattggattctgtcagaaggcctagatttgaaataatgttttgtacttcggtaagatggaaaacttagtgattcactgatttcttagacactctaatatgatatgctttctggaaggataaaacaaatacatatgggaaaaagtacttgagaccaaggccagcatcaattccagacatcttcatgttcctaataggctaaatgaagttaaaaacttatttcagatttttctcatctgtaccttatatctcataaatttattgcatattttatgtcagtagcttagctgtttattgtctttaaaataacatgtaaacttcaatgttctatctggaagcagaataaaatatttacatagatacaaaaaa

SEQ ID NO: 40 - DNA, 1490 bp, Homo sapien
cgcgcccgcaccgtttgttttatttgtaagtgctcagattttgaagtcagatggaccaaggttcagatcctgattgttccagttagtagactttgggcaaactacataacccctgaagcgttacttacctaagacttagagaggctaaggtcatacacgttataaagggcagaaccggaatttcagcattaaaagtccatctaactccaaaactctgtgctcttactcagtgctatgtccactaataaaacttagcagaagtggaccacttaacagagtatgttagtctcttcaagctgccacctcaaaacaccacaggctgggcagcttaaacaataaatttatttctcttgcccagcctgcacacagcaccttctcactgtgccctttgtgtggccatttctgtgtgcacacagagagaaagggacagagaaagctctgttgtctcttcctcttagaatgatactagtctctacggtagaaaagaaagttcatagttaacatttataagattatttaatgtacttacaaaattgtaataaaaactcttactttattagagcattagtttggatgaattcaagtcattttgccattttacaacccacttggaagactttgctattgccatgcagatgttcagtttagctcatcgtcctgtcagactagcggagtttaagagagctgtgaaagtagcaacaggacaagaactctcaaacaatattttggacactgtctttaagatctttgatttggatggtgatgaatgtcttagtcatgaagagtttcttggggtgttaaaaaacagaatgcatcgaggtttatgggtaccacaacatcagagtatacaagaatactggaagtgtgtgaagaaagaaagcattaaaggagtaaaagaagtctggaaacaagctggaaaaggtcttttttaataaaagatataatagtatggcaattatattgttccaaatgtcaaaatttgtgattttttagaagtacttgctatttatcttcttaagtcttcattgatattctgtgtgaaataagcatgtcttgtacttgctttctgattcataattttatgaaagaacttagtagaaagaaaagtaagtataaaaatagatattggattctgtcagaaggcctagatttgaaataatgttttgtacttcggtaagatggaaaacttagtgattcactgatttcttagacactctaatatgatatgctttctggaaggataaaacaaatacatatgggaaaaagtacttgagaccaaggccagcatcaattccagacatcttcatgttcctaataggctaaatgaagttaaaaacttatttcagatttttctcatctgtaccttatatctcataaatttattgcatattttatgtcagtagcttagctgtttattgtctttaaaataacatgtaaacttcaatgttctatctggaagcagaataaaatatttacatagatacaaaaaa

SEQ ID NO: 41 - DNA, 1321 bp, Homo sapien
ctcatgcctgtaatcccagcactttgggagtccaaggtgggcggatcacaaagtcaggagttcaagaccagcctggccaacatggtgaaaccccatctctactaaaaatacaaaaactagctgggcgtggtggcaggcgcctgtaatcccagctattcaggaggccgaggcaagagaatcgcttgaacccgggagacggaggttgtagtgagtcaagatcgtgccattgcactccagcctgggcgacgagcaagattcatctcaaatatatgtttagagcattgattaaattacaatagctcatttgtcttgcagtgactctcatgacattcgtcggcttatggtttgaatattttcttcatgggtatttttgtttttgttttacttcccaaataataaaaatttggatttgcttttacttctcaaataatgaaaatttagattaatttcacttagactatttcacatagttgataagttgttttatgtttgttttttagcggagtttaagagagctgtgaaagtagcaacaggacaagaactctcaaacaatattttggacactgtctttaagatctttgatttggatggtgatgaatgtcttagtcatgaagagtttcttggggtgttaaaaaacagaatgcatcgaggtttatgggtaccacaacatcagagtatacaagaatactggaagtgtgtgaagaaagaaagcattaaaggagtaaaagaagtctggaaacaagctggaaaaggtcttttttaataaaagatataatagtatggcaattatattgttccaaatgtcaaaatttgtgattttttagaagtacttgctatttatcttcttaagtcttcattgatattctgtgtgaaataagcatgtcttgtacttgctttctgattcataattttatgaaagaacttagtagaaagaaaagtaagtataaaaatagatattggattctgtcagaaggcctagatttgaaataatgttttgtacttcggtaagatggaaaacttagtgattcactgatttcttagacactctaatatgatatgctttctggaaggataaaacaaatacatatgggaaaaagtacttgagaccaaggccagcatcaattccagacatcttcatgttcctaataggctaaatgaagttaaaaacttatttcagatttttctcatctgtaccttatatctcataaatttattgcatattttatgtcagtagcttagctgtttattgtctttaaaataacatgtaaacttcaatgttctatctggaagcagaataaaatatttacatagatacaaaaaa

SEQ ID NO: 42 - DNA, 1601 bp, Homo sapien
aggagagagagagagaatatggtactattcatgaaaataaagctatttacaacttagaaaagcaattccatttcctgcaacaaacataacttagggaaaaataaatattattttcattagcaaacatattaatattttataagcttgcagttatccaacacccataaatatattccgggaaattaagccagtcttttcagttcacaattgagtgtacctgggagtctccttgccctttctcagaagacattaaaaagaaaagctgtaaatcagtcataagaaaaagaacatatataatctggagtagaattttgcttccacttggctaattttcatcagtgctatgctcctgtggtcccccggatccaaatatttcctaacctttaccttttcattttgttgagagtagtagtaatccacatgtatttttagctaacaaaacacgtccatgaattagattatttcttgaagcttttcatcaaatattttgtggccttttttttttttaattttagccaatgttaaatcaaagctttaggcttataattgtattctacatagctaaacaaagttcaccagaaaaaaagggaaagattataaaacattataaaaggaaaacattataaagtaattaaattttaaagccagtatgtgaaagaagagatggcccaaagtcttcattaccctcttagagaagaaactccattaatgtgtgctcagtctggttccactccctagtaaccttaagcatagttacattcactttttgtcttttacccccattttcagttctgttgtgatcatcttttacaacataattcaccctcaactatttttggaggagtgtgggaaggaaataaacagtaacgtaaagtatatatgaaatcatgtttaaccttgaagacaatgaccccttgatttttactttcggttaacaggtaccacaacatcagagtatacaagaatactggaagtgtgtgaagaaagaaagcattaaaggagtaaaagaagtctggaaacaagctggaaaaggtcttttttaataaaagatataatagtatggcaattatattgttccaaatgtcaaaatttgtgattttttagaagtacttgctatttatcttcttaagtcttcattgatattctgtgtgaaataagcatgtcttgtacttgctttctgattcataattttatgaaagaacttagtagaaagaaaagtaagtataaaaatagatattggattctgtcagaaggcctagatttgaaataatgttttgtacttcggtaagatggaaaacttagtgattcactgatttcttagacactctaatatgatatgctttctggaaggataaaacaaatacatatgggaaaaagtacttgagaccaaggccagcatcaattccagacatcttcatgttcctaataggctaaatgaagttaaaaacttatttcagatttttctcatctgtaccttatatctcataaatttattgcatattttatgtcagtagcttagctgtttattgtctttaaaataacatgtaaacttcaatgttctatctggaagcagaataaaatatttacatagatacaaaaaa

SEQ ID NO: 43 - DNA, 1344 bp, Homo sapien
cgcgagagttcccaagcggtaggcggcggcgccgggagagaagcgccgtctagctgcgcttccgcaaagatggcggcggctgcgggtagctgcgcgcgggtggcggcctggggcggaaaactgcgacgggggctcgctgtcagccgacaggctgtgcggagtcccggccccttggcagcggcagtggccggcgcggccctggcaggagcaggagcggcctggcaccacagccgcgtcagtgttgcggcgcgggatggcagttttacagtctccgcacagaaaaatgttgaacatggaataatatatattgggaaaccgtctcttcgtaagcagcgcttcatgcagttttcttcactcgaacatgaaggagaatattatatgacaccacgagacttcctcttctcagtgatgtttgagcaaatggaacgtaaaacttcagtcaagaagctgacaaaaaaggacatcgaggatacactgtcagggatccaaacagctggctgtggatcaacttttttcagagaccttggcgataaagggctaatttcatataccgagtatcttttcttgcttacaatcctcactaaaccccattctggatttcatgttgcttttaaaatgctggatacagatggtaatgagatgattgaaaaaagggaattttttaagctgcagaagatcataagtaaacaagatgacttgatgacagtgaaaactaatgaaactggatatcaggaagcaatagtgaaagaacctgaaattaacacaactcttcagatgcgtttctttggaaaaagaggacaaagaaaacttcattataaagaatttcgaagatttatggaaaatttacaaacagagattcaagaaatggaattccttcagttttctaaaggtttgagtttcatgagaaaagaagactttgcagagtggctactttttttcactaacactgaaaataaagatatttattggaaaaatgtgagagagaagttgtcagcaggagagagcattagtttggatgaattcaagtcattttgccattttacaacccacttggaagactttgctattgccatgcagatgttcagtttagctcatcgtcctgtcagactagcggagtttaagagagctgtgaaagtagcaacaggacaagaactctcaaacaatattttggacactgtctttaagatctttgatttggatggtgatgaatgtcttagtcatgaagagtttcttggggtgttaaaaaacagaatgcatcgaggtttatggtcccccacattccaaggttccgaaaactggaaggggtggagaaaggaacctttaaggcgtgaaggtggaaacctc

SEQ ID NO: 44 - DNA, 1773 bp, Homo sapien
cgcgagagttcccaagcggtaggcggcggcgccgggagagaagcgccgtctagctgcgcttccgcaaagatggcggcggctgcgggtagctgcgcgcgggtggcggcctggggcggaaaactgcgacgggggctcgctgtcagccgacaggctgtgcggagtcccggccccttggcagcggcagtggccggcgcggccctggcaggagcaggagcggcctggcaccacagccgcgtcagtgttgcggcgcgggatggcagttttacagtctccgcacagaaaaatgttgaacatggaataatatatattgggaaaccgtctcttcgtaagcagcgcttcatgcagttttcttcactcgaacatgaaggagaatattatatgacaccacgagacttcctcttctcagtgatgtttgagcaaatggaacgtaaaacttcagtcaagaagctgacaaaaaaggacatcgaggatacactgtcagggatccaaacagctggctgtggatcaacttttttcagagaccttggcgataaagggctaatttcatataccgagtatcttttcttgcttacaatcctcactaaaccccattctggatttcatgttgcttttaaaatgctggatacagatggtaatgagatgattgaaaaaagggaattttttaagctgcagaagatcataagtaaacaagatgacttgatgacagtgaaaactaatgaaactggatatcaggaagcaatagtgaaagaacctgaaattaacacaactcttcagatgcgtttctttggaaaaagaggacaaagaaaacttcattataaagaatttcgaagatttatggaaaatttacaaacagagattcaagaaatggaattccttcagttttctaaaggtttgagtttcatgagaaaagaagactttgcagagtggctactttttttcactaacactgaaaataaagatatttattggaaaaatgtgagagagaagttgtcagcaggagaggttggtatacccttttattatgcatgtgataaagatgaaataataagttagacatgtttacataaagtaacttctgaattaaccaagactgtgctaccctcgatggtatataaaatcaacttgaggaatgttctctacatgctcttctcctgtaaaggaaaactactgcctaagacagaatcagtgtagcaattacaagttttccatttccagtaaagtcaagaataagacaagtatcactactgttatttaatatcactctgtaaatcttaaccagtccaaattaacaagattatttaaaagagtataaaaatgtgaaagggggtagtagttgtctttgtttttatatgatgcaattatatgcctagagaacccaagagaatccagtagaaaaaccgtagaaacaataagaattcaataaagtacctgtcacaatgctaatatataagcagcagcagctctcctatatacaaattacaagtagaaaatgtaatgacatgcatatgtgtgtgtatatatatacgagatgtatgaaatgatgattgccaagctattaataattattcatgtacagtggtgaggtttcaagtgatttttactttctttctttatacctttatgtattgttccaaaaaaatgtttacaatggacatgtattttatgtaactttttaaaaagttacttctattgtaagaaaaaaataaattgcagtagaagaacccagttataactgcaagataaatatataacaattagaaataaatttaacaa

SEQ ID NO: 45 - DNA, 756 bp, Homo sapien
cgcgagagttcccaagcggtaggcggcggcgccgggagagaagcgccgtctagctgcgcttccgcaaagatggcggcggctgcgggtagctgcgcgcgggtggcggcctggggcggaaaactgcgacgggggctcgctgtcagccgacaggctgtgcggagtcccggccccttggcagcggcagtggccggcgcggccctggcaggagcaggagcggcctggcaccacagccgcgtcagtgttgcggcgcgggatggcagttttacagtctccgcacagaaaaatgttgaacatggaataatatatattgggaaaccgtctcttcgtaagcagcgcttcatgcagttttcttcactcgaacatgaaggagaatattatatgacaccacgagacttcctcttctcagtgatgtttgagcaaatggaacgtaaaacttcagtcaagaagctgacaaaaaaggacatcgaggatacactgtcagggatccaaacagctggctgtggatcaacttttttcagagaccttggcgataaagggctaatttcatataccgagtatcttttcttgcttacaatcctcactaaaccccattctggatttcatgttgcttttaaaatgctggatacagatggtaatgagatgattgaaaaaagggaattttttaaggtaagtggacgctaattattttaggtttatcataaaatacctggatgtttgtgtgataattttacatttccattaaaatcaaaattgtat

SEQ ID NO: 46 - DNA, 1879 bp, Homo sapien
atttgaatttctaaactaagggaaactaatttaggtggggaaaaaaatcagaactgtctctgtgggaacaagaataaaagagaaaccaggattgactgggaagagacacaaagaaactttgtcaaaattggctgatatttgtacattttaatatatgtattttttcctgaagagctgtaaataataattgggaggggaacagggagcaggtagaggtatagaagagccaggaatagcagaatactggtaattattgaagattaataatgtttacatggtgacttgttcgtagaattctgttcattttacttaagtttgaaattttctgtaataaaaatttgtaagaggttccaggggaataagcacagggagaaatgtgtggatattgaacttggcattatatcatttgattgtcaactttaaaaataaaaggtaaaataaatataaagctttttaacttttttcccaaaaataattaagtaggggaaaggggggtattgaaaactggctgagagatttagagaactagaaataaaccacttgcctaaaacaaacgtaatagaaatagctaaattcaaaataattaatacggaattaattgcagcagttttcaaactgttaaatagcccagaaaaaaatggatagaggtttgtctcctaattgatttgaatccatagtttgggattttgtctacatctgattcttttaaaatgctttcttttttaaatttgctttccatatgaggattgatacaattgattctgaaaggcagctgcagaagatcataagtaaacaagatgacttgatgacagtgaaaactaatgaaactggatatcaggaagcaatagtgaaagaacctgaaattaacacaactcttcagatgcgtttctttggaaaaagaggacaaagaaaacttcattataaagaatttcgaagatttatggaaaatttacaaacagagattcaagaaatggaattccttcagttttctaaaggtttgagtttcatgagaaaagaagactttgcagagtggctactttttttcactaacactgaaaataaagatatttattggaaaaatgtgagagagaagttgtcagcaggagaggttggtatacccttttattatgcatgtgataaagatgaaataataagttagacatgtttacataaagtaacttctgaattaaccaagactgtgctaccctcgatggtatataaaatcaacttgaggaatgttctctacatgctcttctcctgtaaaggaaaactactgcctaagacagaatcagtgtagcaattacaagttttccatttccagtaaagtcaagaataagacaagtatcactactgttatttaatatcactctgtaaatcttaaccagtccaaattaacaagattatttaaaagagtataaaaatgtgaaagggggtagtagttgtctttgtttttatatgatgcaattatatgcctagagaacccaagagaatccagtagaaaaaccgtagaaacaataagaattcaataaagtacctgtcacaatgctaatatataagcagcagcagctctcctatatacaaattacaagtagaaaatgtaatgacatgcatatgtgtgtgtatatatatacgagatgtatgaaatgatgattgccaagctattaataattattcatgtacagtggtgaggtttcaagtgatttttactttctttctttatacctttatgtattgttccaaaaaaatgtttacaatggacatgtattttatgtaactttttaaaaagttacttctattgtaagaaaaaaataaattgcagtagaagaacccagttataactgcaagataaatatataacaattagaaataaatttaacaa

SEQ ID NO: 47 - DNA, 570 bp, Homo sapien
atttgaatttctaaactaagggaaactaatttaggtggggaaaaaaatcagaactgtctctgtgggaacaagaataaaagagaaaccaggattgactgggaagagacacaaagaaactttgtcaaaattggctgatatttgtacattttaatatatgtattttttcctgaagagctgtaaataataattgggaggggaacagggagcaggtagaggtatagaagagccaggaatagcagaatactggtaattattgaagattaataatgtttacatggtgacttgttcgtagaattctgttcattttacttaagtttgaaattttctgtaataaaaatttgtaagaggttccaggggaataagcacagggagaaatgtgtggatattgaacttggcattatatcatttgattgtcaattatttcagatttttctcatctgtaccttatatctcataaatttattgcatattttatgtcagtagcttagctgtttattgtctttaaaataacatgtaaacttcaatgttctatctggaagcagaataaaatatttacatagatacaaaaaa

SEQ ID NO: 48 - DNA, 699 bp, Homo sapien
  misc_feature (110)..(110): n=a,c,g or t
  misc_feature (159)..(159): n=a,c,g or t
  misc_feature (174)..(174): n=a,c,g or t
agcgaacagcccagcaacaacaaaagtcgaacaagactttggttgggccttgtggagctttgaaatcaagttctttctttacagcatcatccttaagtgtcaacagatgncggatttctgaggacagcttttgatccacaacggacagcttgttgatcnaatttcggtaggtancaagcctttctatgacaggatgtccatgtgctgggactctcctagctttcaggatcaaataaaaactgatgttcgagcaataattcaagtagaggttgtacttggtcctcaagtattggcttccttttccgggtggaatgatcccttgttccaccaactctaacaatggctccagctcatccttaacctctgtcaacttgactttcaggtcttctatcagctccaagagttctggtgattcctttcgcaacattttcagcttctctttcactgaaactttagccaaatccttcacgacccgtgtctcagcctcatctacctgaggcactgctcgtgccgaattcggcacgagggctaaatgaagttaaaaacttatttcagatttttctcatctgtaccttatatctcataaatttattgcatattttatgtcagtagcttagctgtttattgtctttaaaataacatgtaaacttcaatgttctatctggaagcagaataaaatatttacatagatacaaaaaa

SEQ ID NO: 49 - DNA, 1960 bp, Homo sapien
cgcgagagttcccaagcggtaggcggcggcgccgggagagaagcgccgtctagctgcgcttccgcaaagatggcggcggctgcgggtagctgcgcgcgggtggcggcctggggcggaaaactgcgacgggggctcgctgtcagccgacaggctgtgcggagtcccggccccttggcagcggcagtggccggcgcggccctggcaggagcaggagcggcctggcaccacagccgcgtcagtgttgcggcgcgggatggcagttttacagtctccgcacagaaaaatgttgaacatggaataatatatattgggaaaccgtctcttcgtaagcagcgcttcatgcagttttcttcactcgaacatgaaggagaatattatatgacaccacgagacttcctcttctcagtgatgtttgagcaaatggaacgtaaaacttcagtcaagaagctgacaaaaaaggacatcgaggatacactgtcagggatccaaacagctggctgtggatcaacttttttcagagaccttggcgataaagggctaatttcatataccgagtatcttttcttgcttacaatcctcactaaaccccattctggatttcatgttgcttttaaaatgctggatacagatggtaatgagatgattgaaaaaagggaattttttaaggattgatacaattgattctgaaaggcagctgcagaagatcataagtaaacaagatgacttgatgacagtgaaaactaatgaaactggatatcaggaagcaatagtgaaagaacctgaaattaacacaactcttcagatgcgtttctttggaaaaagaggacaaagaaaacttcattataaagaatttcgaagatttatggaaaatttacaaacagagattcaagaaatggaattccttcagttttctaaaggtttgagtttcatgagaaaagaagactttgcagagtggctactttttttcactaacactgaaaataaagatatttattggaaaaatgtgagagagaagttgtcagcaggagagagcattagtttggatgaattcaagtcattttgccattttacaacccacttggaagactttgctattgccatgcagatgttcagtttagctcatcgtcctgtcagactagcggagtttaagagagctgtgaaagtagcaacaggacaagaactctcaaacaatattttggacactgtctttaagatctttgatttggatggtgatgaatgtcttagtcatgaagagtttcttggggtgttaaaaaacagaatgcatcgaggtttatgggtaccacaacatcagagtatacaagaatactggaagtgtgtgaagaaagaaagcattaaaggagtaaaagaagtctggaaacaagctggaaaaggtcttttttaataaaagatataatagtatggcaattatattgttccaaatgtcaaaatttgtgattttttagaagtacttgctatttatcttcttaagtcttcattgatattctgtgtgaaataagcatgtcttgtacttgctttctgattcataattttatgaaagaacttagtagaaagaaaagtaagtataaaaatagatattggattctgtcagaaggcctagatttgaaataatgttttgtacttcggtaagatggaaaacttagtgattcactgatttcttagacactctaatatgatatgctttctggaaggataaaacaaatacatatgggaaaaagtacttgagaccaaggccagcatcaattccagacatcttcatgttcctaataggctaaatgaagttaaaaacttatttcagatttttctcatctgtaccttatatctcataaatttattgcatattttatgtcagtagcttagctgtttattgtctttaaaataacatgtaaacttcaatgttctatctggaagcagaataaaatatttacatagatacaaaaaa

SEQ ID NO: 50 - DNA, 1338 bp, Homo sapien
cgcgagagttcccaagcggtaggcggcggcgccgggagagaagcgccgtctagctgcgcttccgcaaagatggcggcggctgcgggtagctgcgcgcgggtggcggcctggggcggaaaactgcgacgggggctcgctgtcagccgacaggctgtgcggagtcccggccccttggcagcggcagtggccggcgcggccctggcaggagcaggagcggcctggcaccacagccgcgtcagtgttgcggcgcgggatggcagttttacagtctccgcacagaaaaatgttgaacatggaataatatatattgggaaaccgtctcttcgtaagcagcgcttcatgcagttttcttcactcgaacatgaaggagaatattatatgacaccacgagacttcctcttctcagtgatgtttgagcaaatggaacgtaaaacttcagtcaagaagctgacaaaaaaggacatcgaggatacactgtcagggatccaaacagctggctgtggatcaacttttttcagagaccttggcgataaagggctaatttcatataccgagtatcttttcttgcttacaatcctcactaaaccccattctggatttcatgttgcttttaaaatgctggatacagatggtaatgagatgattgaaaaaagggaattttttaagctgcagaagatcataagtaaacaagatgacttgatgacagtgaaaactaatgaaactggatatcaggaagcaatagtgaaagaacctgaaattaacacaactcttcagatgcgtttctttggaaaaagaggacaaagaaaacttcattataaagaatttcgaagatttatggaaaatttacaaacagagattcaagaaatggaattccttcagttttctaaaggtttgagtttcatgagaaaagaagactttgcagagtggctactttttttcactaacactgaaaataaagatatttattggaaaaatgtgagagagaagttgtcagcaggagagagcattagtttggatgaattcaagtcattttgccattttacaacccacttggaagactttgctattgccattgcgaaggttcaattaacttatatggccggtaggcaacggggggttaaagagaggtggaaggggcacacgggcagagaccttaacaataatttgggcaacggcttaaaaaccttgtttggattggaggaaagtgctaaacaatgagagagttttgtgggggtaaaaaccaaagcgctccgggtttgtggggcccaacacttcagggtttccgaatactttgagtgggtgaaaagaaccttttaggggtggaagttggcacctttg

SEQ ID NO: 51 - DNA, 1220 bp, Homo sapien
caaatggtgtgcataatgcctggaattgcactctgcagcagtgggctcactggaacgttgagagtcttttagttgggaatggttctggttttctgacctggccccaggatgggcaaaggaaaatgctaaagtagcttctttagagttcatgtgtctcctcccatccttccttccccaagcagagcttcagatcagcagctcttcgcttgctgcttgccaaggccaatccctttctccttaagggatgtcagcatttcttagaaaaaaatgtgctattgagagcttcattgtggcttgcccctttccttgtgttatgttgatattttaattacaatgcttcctgacctcccaggttttcttgaagcagtcatgtgctgtggcctcattatacaatgagcaacagcattgcttccccaacccatacaatggcagcaaaatggattagatagtgctttcctatagttccggagaaacacaagccaagaaattactgcaataattgttatctcttgtccagtgctactgtgtatggggatacatgtgaaaaatgtggatgcatttcacccttgaaaccccaagagctagatattcttagggttttcagtttagcacagggttaaaagcacatgccctggttcagacctgagcacctctgctgtggaccatgtggcaaattaaccttatggtgcctccggaaatacatctgttacatagagatactatgtctacttactaaggttttgagaattaaatgagctaatgtatataaagtaactcagtgcttggcacatatggtatgcccagtaaatgttaactatttttattctaaatgagtaaacagagtcaaaaaatggtgaagtgacagccagatgttatatctggtaaaaatacagtaaggaaaggaaccccagccttagctacaccccccactcttatcttatagttatttaattagaacccaggtctcttgattctcactcctctttgcaataggaatttcttacctcttggtccaactgctgttgcatttcagctggagacacgtgaattgggggctcctaatgaagcctcctagcctgcttacctgtcataactatcaagggtacttacagaaaaaggtaaaagcaaagacctcagaggtggaggggataattcacttttgcattctcagttctggaaaagctatagagtttaaatttaacaacaacaacaacgatgac

SEQ ID NO: 52 - DNA, 1220 bp, Homo sapien
caaatgaatgccataatgcctggaattgcactctgcagcagtgggctcactggaacgttgagagtcttttagttgggaatggttctggttttctgacctggccccaggatgggcaaaggaaaatgctaaagtagcttctttagagttcatgtgtctcctcccatccttccttccccaagcagagcttcagatcagcagctcttcgcttgctgcttgccaaggccaatccctttctccttaagggatgtcagcatttcttagaaaaaaatgtgctattgagagcttcattgtggcttgcccctttccttgtgttatgttgatattttaattacaatgcttcctgacctcccaggttttcttgaagcagtcatgtgctgtggcctcattatacaatgagcaacagcattgcttccccaacccatacaatggcagcaaaatggattagatagtgctttcctatagttccggagaaacacaagccaagaaattactgcaataattgttatctcttgtccagtgctactgtgtatggggatacacgtgaaaaatgtggatgcatttcacccttgaaaccccaagagctagatattcttagggttttcagtttagcacagggttaaaagcacatgccctggttcagacctgagcacctctgctgtggaccatgtggcaaattaaccttatggtgcctccggaaatacatctgttacatagagatactatgtctacttactaaggttttgagaattaaatgagctaatgtatataaagtaactcagtgcttggcacatatggtatgcccagtaaatgttaactatttttattctaaatgagtaaacagagtcaaaaaatggtgaagtgacagccagatgttatatctggtaaaaatacagtaaggaaaggaaccccagccttagctacaccccccactcttatcttatagttatttaattagaacccaggtctcttgattctcactcctctttgcaataggaatttcttacctcttggtccaactgctgttgcatttcagctggagacacgtgaattgggggctcctaatgaagcctcctagcctgcttacctgtcataactatcaagggtactcacagaaaaaggtaaaagcaaagacctcagaggtggaggggataattcacttttgcattctcagttctggaaaagctatagagtttaaatttaacaacaacaacaacgatgac

SEQ ID NO: 53 - DNA, 1067 bp, Homo sapien
ggaaaacacccttctaacattaattgttataaaaaagacttttagagtgccagaaaaatgatagtctgtattcccaagtccttagtctctgctattataatttagatgatttggaagtttctatttctggcatgtggatttgtttcataaatgagcatatatatctgcattagagtgaaatgatgaggaacaccctgttgtcaattagagattcaacatagatacagcatttaaatcctcctttgtttgttgatagatgtacataatctcctcttgctgagtcattctacttctattccatacatagaaaatataacctttcataagaatcaactgtcagatacttatgtgttctttctaaaaagtattgacttaaaaaaaattaccaaacttagaatttcaaacatgttcatcaatgtgatgaactccccagctttccaagttgtcctgcgtctgctgttgaccacctagcatggcttctggaatcggtaagtgaggaatctgacaataaatggggcaggaaggagagtcatgaaaatctgtgatggcatttatgattgttacaatgacaaagggcatttactgatatttagtgggtgcaaaccagagtacctatacatgctacactacacagtatagttttaaacaagaaagaaatgttccatgtcctacattaatttgaacatctggctggacatccatctgagcctggaacccaactttgcttaaatgaaatgacagagtaggttttgtaatatatggcatttttgcagagttttagtactcacaaaatattaaatgttagcatccacccctacctctgcttcttgattttactatactgctgtataaaaggttgaaagacttctgatctgattttattgctcctgaattctgactttttcatgctaaataagtgcaagcatataaacccttttttatatcctttagtatagtcatagactgaacatttacttagtaaacagatattatatatttactttcctatttcccctttttatcctaaatagaccattttttaatatttaatccttgatatttttaaa

SEQ ID NO: 54 - DNA, 1135 bp, Homo sapien
ggaaaacacccttctaacattaattgttataaaaaagacttttagagtgccagaaaaatgatagtctgtattcccaagtccttagtctctgctattataatttagatgatttggaagtttctatttctggcatgtggatttgtttcataaatgagcatatatatctgcattagagtgaaatgatgaggaacaccctgttgtcaattagagattcaacatagatacagcatttaaatcctcctttgtttgttgatagatgtacataatctcctcttgctgagtcattctacttctattccatacatagaaaatataacctttcataagaatcaactgtcagatacttatgtgttctttctaaaaagtattgacttaaaaaaaattaccaaacttagaatttcaaacatgttcatcaatgtgatgaactccccagctttccaagttgtcctgcgtctgctgttgaccacctagcatggcttctggaatcggtaagtgaggaatctgacaataaatggggcaggaaggagagtcatgaaaatctgtgatggcatttatgattgttacaatgacaaagggcatttactgatatttagtgggtgcaaaccagagtacctatacatgctacactacacagtatagttttaaacaagaaagaaatgttccatgtcctacattaatttgaacatctggctggacatccatctgagcctggaacccaactttgcttaaatgaaatgacagagtaggttttgtaatatatggcatttttgcagagttttagtactcacaaaatattaaatgttagcatccacccctacctctgcttcttgattttactatactgctgtataaaaggttgaaagacttctgatctgattttattgctcctgaattctgactttttcatgctaaataagtgcaagcatataaacccttttttatatcctttagtatagtcatagactgaacatttacttagtaaacagatattatatatttactttcctatttcccctttttatcctaaatagaccattttttaatatttaatccttgatatttttaaaatctgtgtaagttatattatccagggatttctagatttaaagagaaaattacagaatgcttgttatta

SEQ ID NO: 55 - DNA, 1134 bp, Homo sapien
ggaaaacacccttctaacattaattgttataaaaaagacttttagagtgccagaaaaatgatagtctgtattcccaagtccttagtctctgctattataatttagatgatttggaagtttctatttctggcatgtggatttgtttcataaatgagcatatatatctgcattagagtgaaatgatgaggaacaccctgttgtcaattagagattcaacatagatacagcatttaaatcctcctttgtttgttgatagatgtacataatctcctcttgctgagtcattctacttctattccatacatagaaaatataacctttcataagaatcaactgtcagatacttatgtgttctttctaaaaagtattgacttaaaaaaaattaccaaacttagaatttcaaacatgttcatcaatgtgatgaactccccagctttccaagttgtcctgcgtctgctgttgaccacctagcatggcttctggaatcggtaagtgaggaatctgacaataaatggggcaggaaggagagtcatgaaaatctgtgatggcatttatgattgttacaatgacaaagggcatttactgatatttagtgggtgcaaaccagagtacctatacatgctacactacacagtatagttttaaacaagaaagaaatgttccatgtcctacattaatttgaacatctggctggacatccatctgagcctggaacccaactttgcttaaatgaaatgacagagtaggttttgtaatatatggcatttttgcagagttttagtactcacaaaatattaaatgttagcatccacccctacctctgcttcttgattttactatactgctgtataaaaggttgaaagacttctgatctgattttattgctcctgaattctgactttttcatgctaaataagtgcaagcatataaacccttttttatatcctttagtatagtcatagactgaacatttacttagtaaacagatattatatgtttactttcctatttcccctttttatcctaaatagaccattttttaatatttaatccttgatatttttaaaatctgtgtaagttatattatccagggatttctagatttaaagagaaaattacagaatgcttgttatt

SEQ ID NO: 56 - DNA, 244 bp, Homo sapien
aaaaagtcagtgtggataacattaggcacaatatacagttatgtttggtgatcaaaacaaggttttattctgtatgaactcctgccaggggatagaactaaaacatgaaaagtaactactacaaaagcactgtagatccttttgctgatgtttcactatcactgtaagattttaaagtatgagtacccttcaaaagtgttctgttttcagtaagttgtaatagctcaccttataacttatgtgc

SEQ ID NO: 57 - DNA, 244 bp, Homo sapien; identical to SEQ ID NO: 56

SEQ ID NO: 58 - DNA, 528 bp, Homo sapien
  misc_feature (514)..(514): n=a,c,g or t
gcctacagtgtacaaagcactggggtaaggaaagattagtttgtacaggtttgcaaataattcaaggcaataaataaaatgtagggacagtagtacagagaaattatgaagactgggggtagaattagctggcattaaagctccagcttggaactggagtattatggtgtctgacactcaactgtgatcccagtgttaggcttgatagcagcatatcccttaggcatttaaggagaggaaagaagttagatggaggggctcctgtcactgtccccactgactttgtaggcctcgtgaatccttaatatcacagacctaatgagcattcctatttttatttttttttaagtattagttttgtccaggcaacaacatcaaaggatttcagagttgtcttaagacctggtaacatattgctatagaagttaggaaggtactattaatagttttctaaataggaaaactgaagattaaaaattaaatattttgggggctgggcaaaggttcctcacgncctgtaatcccagc

SEQ ID NO: 59 - DNA, 1181 bp, Homo sapien
gttggatgttgtgcttcagagcgtaggctttatttccacatctggctatacacatgtgtatgcatgcataggacctaatctgactaatgtgcattatgtccccatcctttgcaatcagaatatcaatgagcatggtggttttcaaaattaattgattttgctattaatagttcaaacctaaaatttctgggatctgtgaaaagaggtagttattacttggaggcagaagaactattgcttctgaaataggaagcaaaatgaagagagctttccaaatgtgtttcttagataaggcccatccttatgtagaaacatagcaaaagaacttaaaactagattatagatggtttggaagatgggaaagaacaagtaaatacatgaattgctagtagtggcagaagccaagtactgttgggaaaagagtagtagctttggaaaaagggactcaggaaaagagtgatcaaaaatagttactatgaaattttagtttggcgtaatgacttagttcaagaagaaaggacatctctattccaagaaagttcaaatcaaatgttaataagctggtatgtactttagcatgtgaagatcacccctctgttccaaaaaccggtaggcttcataaataaataatttatttcttaaacatgtatttagtgcctacagtgtacaaagcactggggtaaggaaagattagtttgtacaggtttgcaaataattcaaggcaataaataaaatgtagggacagtagtacagagaaattatgaagactgggggtagaattagctggcattaaagctccagcttggaactggagtattatggtgtctgacactcaactgtgatcccagtgttaggcttgatagcagcatatcccttaggcatttaaggagaggaaagaagttagatggaggggctcctgtcactgtccccactgactttgtaggcctcgtgaatccttaatatcacagacctaatgagcattcctatttttatttttttttaagtatttagttttgtccaggcaacaacatcaaaggatttcagagttgtcttaagacctggtaacatattgctatagaagttaggaaggtactattaatagttttctaaataggaaaactgaagattaaaaattaaatattttggggctgggcaaggttcctcacgcctgtaatcccagc

SEQ ID NO: 60 - DNA, 746 bp, Homo sapien
ggcgccgagatgggcggataaaaggagcgaccgctcagcagcgagagggagaggcgagagtaaggcgcccagacaccatgtggacaaggggaggagagaaatcagaggtggcgcgcgaaggctgagcgcccaggcagccagagcccagatcggaagagccgagtccgggcagaggggtccgcgggctctggaggtgctggacgggtgcgatccgagagcagaccggggccctcgcgagcctctcccggcccctgcccgcgatgagcgaggccagccgactgtgctccggctactacagcctcaaccagagcttcgtggagcccttccagtgcccccggcgcggcgagggggcagcgctccagtattgctgcggcttcgccgacctcaagtactgctgcagcgagccgggcagctacttcccctacaagcacagctacatgtggagcctcaggtgggctgagagcccgcgcgtgcggcggctggccgagcccggggctagggaggcgacaagcggagccacgccagggccagggaggttcccccgcgtccccgctatccgccctaggttaggtccctacggaaggacgcggagcctctgagggcgggtgagggcagggagagaaatctcgccccggctcggagctcccccgggagccaggacaggaggcgaggcgcacgctgaggagcgcgggctttgcgcccagggcgcacttgtgggcccgctggttggccccgctgagttcccc

SEQ ID NO: 61 - DNA, 949 bp, Homo sapien
cggccgagagctccaccgctgaggccaacgaggccacgctttatttttattgtcccatctctccagtaagcatttaaaacacagaatttttagttaataagcaatgtggatttgtgttgcatccattgttttttcttgaattatatcatcagcttcatagtatgtttcatttgttgcatttgatgctgcatttgaattgagggctttggtttttccatttgacttgccttcttgagtggaagaagcctctaagtgttgaagcttaaggccagtgtctaatctttgaggtttcgtatacagaaataaatagcaaaggacacagacactgatgacaaaggcgagtaaaacaagggcagcaattcctagtccaatcaaggcaccaatgctgtatttggaacatacgtcattgaaaagtaatgatctttttcttcattatcttcctggcttgcctttaggcttctgctctttctctgggattaggacactgacaagtttgacctgaggctccacatgtagctgtgcttgtaggggaagtagctgcccggctcgctgcagcagtacttgaggtcggcgaagccgcagcaatactggagcgctgccccctcgccgcgccgggggcactggaagggctccacgaagctctggttgaggctgtagtagccggagcacagtcggctggcctcgctcatcgcgggcaggggccgggagaggctcgcgagggccccggtctgctctcggatcgcacccgtccagcacctccagagcccgcggacccctctgcccggactcggctcttccgatctgggctctggctgcctgggcgctcagccttcgcgcgccacctctgatttctctcctccccttgtccacatggtgtctgggcgccttactctcgcctctccctctcgctgctgagcggtcgctccttttatccgcccatctcggcgcc

SEQ ID NO: 62 - DNA, 747 bp, Homo sapien
ggggaactcagcggggccagccaggcgggccccaagtgcgccctgggcgcaaagcccgcgctcctccagcgtgcgcctcgcctcctgtcctggctcccgggggagctccgagccggggcgagatttctctccctgccctcacccgccctcagaggctccgcgtccttccgtagggacctaacctagggcggatagcggggacgcgggggaacctccctggccctggcgtggctccgcttgtcgcctccctagccccgggctcggccagccgccgcacgcgcgggctctcagcccacctgaggctccacatgtagctgtgcttgtaggggaagtagctgcccggctcgctgcagcagtacttgaggtcggcgaagccgcagcaatactggagcgctgccccctcgccgcgccgggggcactggaagggctccacgaagctctggttgaggctgtagtagccggagcacagtcggctggcctcgctcatcgcgggcaggggccgggagaggctcgcgagggccccggtctgctctcggatcgcacccgtccagcacctccagagcccgcggacccctctgcccggactcggctcttccgatctgggctctggctgcctgggcgctcagccttcgcgcgccacctctgatttctctcctccccttgtccacatggtgtctgggcgccttactctcgcctctccctctcgctgctgagcggtcgctccttttatccgcccatctcggcgcc

SEQ ID NO: 63 - DNA, 668 bp, Homo sapien
aaaaaaaaaaagattttaaggaaggaaatgacttttattagggtttggttttatcaatttcataatccgattaatcccaccatttttaaaagatgaaattgctttcattagaaggctacataaaatataatttgattattttaggctctattattagactcacatttctttctacagtctcattattatttccaaaaattacacagtaacctaaatcatctaaaaacacataaagctactgtattctttattagatccatccccagagttatatgtacatgtacatactttgagatgtgttttgttcttaattgtattttaggttatttttgactgacttaaattctatcactattttaatatttgttaggtccgaataaaccatttagaatatttttcagtgtacaaaatgtgctgtaatttaataaggccccttgcttttaaaatttggcttaacctggtgaggccaccggcttgaagttccgaggacactccccttggtcccctgttggacccgtgggttttactccaaggaccccatgttaaccttcttaacacgagaggctttaagcctcaactggttctttggttggaccaaaatttcttggaaatgggggcccaagacaaaagggttttttatcaccgtgggtcccctgtgggcccctctt

SEQ ID NO: 64 - DNA, 3357 bp, Homo sapien
aaaaaaaaaaagattttaaggaaggaaatgacttttattagggtttggttttatcaatttcataatccgattaatcccaccatttttaaaagatgaaattgctttcattagaaggctacataaaatataatttgattattttaggctctattattagactcacatttctttctacagtctcattattatttccaaaaattacacagtaacctaaatcatctaaaaacacataaagctactgtattctttattagatccatccccagagttatatgtacatgtacatactttgagatgtgttttgttcttaattgtattttaggttatttttgactgacttaaattctatcactattttaatatttgttaggtccgaataaaccatttagaatatttttcagtgtacaaaatgtgctgtaatttaataaggccccttgcttttaaaatttggcttaacctgtgaagcacaactgcttcagagttacagagaaacataccagttggtccactggatgagccctgtggttctacctcaggtaacctagtgataagctagctcagcagggagtgcttcaaggactccagctgatcctagtgctgagaccaaaacttcctggacattgggtgcccaagaacagtaggtttcttataccagtgtgacaataatcccagttgcgaaggccagtcttctgatctcagtatctcctcccaactcctctaaaaataggtagagtggcagagaattggggtgcctcttctatagcacaacccatgatgcatccagtcatgcctgaccccactatgcctttcccacaaattgggaggagttggggcagtgagcattttgctagctctgtctgtttcttgcttcttgtgccatttatagtccttggccatgagcaacaaaagtagaatggtgccagtgccttaactaaatttttctcaacctagattttcacctgagacaatatggtaatattattaaattactgtaaagatagcaaattttctgggatactttaaaatcaaagttgtatcaaagatcaagaagcacccataaaagctttataaactttcacaaaaaataagtgaaaattctttgtttttatggccgtgtaaaatgtcatttttataatggaaatgtcttaattttcaaacttaacatatactttaagcaattttagtatttaaacctttgcaaaattgtatttttgaatgtgaagttcaactttggcagtaggttgttgcaatagtgatctggcactatggtgccagtatagccacatagggttatttaaattaattaaataaatgaaaaattttattttttcagttgcattagccacatcttaagtgttcagtagccacatgtgactggtggctaccatattagtgcagatatagaaagaacatttccatcatcacagaaacttctcttaattctggtctagaagataaccttagtacttggtagaaattttgacaggctaatgacgaaaagtttgtaaccctgagctttgcatgcccaagaaaaataaggtattcttttttatatatcagaccagagaagctgtattcagcacattttgaaatgctagtttttggctatggccataccaccctaaatgtgccagatcttgtctgaaatgctagtttctgactacaaaaactacaggacatagtagatatgctcagtagagctgcttaaaataattccctttttttttctgttgaattctgttacaaaaccaggtctgtgttataatagaaaacacacttatgaataaaaatctttaaaaattataatttgcagaaattagttttatttctagatttctaggtggtattaatgtgatagcattaggtgggaccagagaactcatttgttttgtagctttcattatacagattatttaggaaatatatcagcaaaggattttttgttatgcttatctcttgaaacaaaatatttattgtacagattatacattgtgatttttttgttactgagtatattgtttgtgcccagaaaaatctaaaaagatgtgggttgacttctaagagatttaagaacaagtcacctctagtttttaagacagttcccttgatatttacctatccagtaccatctcataagaataactgcctgtaagtatcagaaagttgagaaatgctggtaatgtgacataaacttctcactgttcttcactgagataggactgcttatcttgttattgataaattatttaatttctcctgaataattagcataatctcatgtgatacagaaacatcttaattagcaaataaatttatacaaaggaaaaccaataaaaccttaatgtgcgtttaataaagtaactgaatgatcaaaaatgcagctgtgtcttgctttgtgagtgacgaatttttgaaaagcaatattacaaaccgtttcaagtgcacgctttatttttattgtcccatctctccagtaagcatttaaaacacagaatttttagttaataagcaatgtggatttgtgttgcatccattgttttttcttgaattatatcatcagcttcatagtatgtttcatttgttgcatttgatgctgcatttgaattgagggctttggtttttccatttgacttgccttcttgagtggaagaagcctctaagtgttgaagcttaaggccagtgtctaatctttgaggtttcgtatacagaaataaatagcaaaggacacagacactgatgacaaaggcgagtaaaacaagggcagcaattcctagtccaatcaaggcaccaatgctgtatttggaacatacgtcattgaaaagtaatgatctttttcttcattatcttcctggcttgcctttaggcttctgctctttctctgggattaggacactgacaagtttgacctgaggctccacatgtagctgtgcttgtaggggaagtagctgcccggctcgctgcagcagtacttgaggtcggcgaagccgcagcaatactggagcgctgccccctcgccgcgccgggggcactggaagggctccacgaagctctggttgaggctgtagtagccggagcacagtcggctggcctcgctcatcgcgggcaggggccgggagaggctcgcgagggccccggtctgctctcggatcgcacccgtccagcacctccagagcccgcggacccctctgcccggactcggctcttccgatctgggctctggctgcctgggcgctcagccttcgcgcgccacctctgatttctctcctccccttgtccacatggtgtctgggcgccttactctcgcctctccctctcgctgctgagcggtcgctccttttatccgcccatctcggcgcc

SEQ ID NO: 65 - DNA, 228 bp, Homo sapien
gctcgagaaacacacccacacactcctggctgtcaaacagtaaaccacaatttcaccttcttaggcaagccgtcaaattgtagttttttttaagcagcattactttttggtttacacataataaacattaaaaagatagcaaaagatatataattctttataaagattatttctgtttatgtgaaggtaataaacttccaatgaaataaaattagttatatgagaaag

SEQ ID NO: 66 - DNA, 225 bp, Homo sapien
tattaaaacacacccacacactcctggctgtcaaacagtaaaccacaatttcaccttcttaggcaagccgtcaaattgtagttttttttaagcagcattactttttggtttacacataataaacattaaaaagatagcaaaagatatataattctttataaagattatttctgtttatgtgaaggtaataaacttccaatgaaataaaattagttatatgaaaac

SEQ ID NO: 67 - DNA, 362 bp, Homo sapien
cagaattcaattattggctgtttttaaaaagatatgccttaaatatgaatacacaaaaaggttgaagatgaaagaatttaaaacagatgtaacacataaacactaatgattctagtttgacattaattttttattaacatagtgaagttattttattttcttctaacttccactgctgctgttgaggaatcagttgtcataattgttgttcatttgaagatgatctgtatttcttctctggctggtcataagatttttttatggcatgcctagatgtgcttttcatttcatttatcttacttgatatccattaccctttctgtaactattaaccaatttttagttttgtaattattttcccc

SEQ ID NO: 68 - DNA, 362 bp, Homo sapien; identical to SEQ ID NO: 67

SEQ ID NO: 69 - DNA, 290 bp, Homo sapien
cctgcccctctccttgtttttacagatcactttttaaaaatatatatactcagaccccagaagctcagacatttatctgtatttttattaaaatcacccagatagttctgatgtatattcgtatttaatagtggctgatattgtacatggccctaatttttccttgttctgagtcctgatttttccactctgataagtatttgatcccggattagtcattggtaaaatagatctattgcttatcttttctatttaatataattgtattcatttagaaaacatggaattta

SEQ ID NO: 70 - DNA, 565 bp, Homo sapien
agaaaattcagatatttttacatcattgaaagctaaaactttgttacttacataagtgcttaaaaggcatgcaatgcccataaattctgtgttagattcaaaatagttaaccttattttatacattatagaaattctaaggttaattttttaaaaattaggtcttaaaatgcttacatttacaaatctgatcaatagttgcaacctcttgttactgtttgcttttataaattgaccattagatgcttgtgctcatgagttgacacattgaaattatgcaaggttgaattttgaaaaatctctgtcaccatatttaatggttcaagggaatgaaaggattctagttacataggcctaaaggacataatgaaatttaaaatttgtttcccttagaaaagattaagatatattttcttaaaagatattaagaaaggtattcttccatatcctaagttcccttagtaagtttccatgattagcatcaattgttgaagtgaagttaatttatgtgtgtcttaccgaatttactgtggataaaggatgactcaaataagtatacacttggc

SEQ ID NO: 71 - DNA, 1172 bp, Homo sapien
gacaactttcagttagatgagctctaattagaagtttctagtgctcagtactttccactatgaactagcaactacacatagagatctacaatctgatctttcatcatgaaacttgagatataagtaccttgatgcttcaacagagctaaaccaaggctccacctcttcctaatcatgctccaaccagtatttttttttaacttaatgccttttattcattcaacagcttgctttgcagagctcacagctgtaacagatgtgtcctatggtaagctcttccacagtaactgtagcctgttggtcatgagcttccatttgttgaactctacattgtgactgacaaacttggctgcaccttaaaattacctgaagagcttttaaaacttgctgtcaattaaatcaaattctctgagagtgggacctaatgctcagtgtgttttttaaagctcccagtttatttcagtgtgtggctaaagaaccacaacacaatatcctaaacttctcattactgatcattctttcttcaatgttctttttctttattcatcatcacttaacatttcctctaaggctttattagcatagttctataattccttagagttaaagaaaattcagatatttttacatcattgaaagctaaaactttgttacttacataagtgcttaaaaggcatgcaatgcccataaattctgtgttagattcaaaatagttaaccttattttatacattatagaaattctaaggttaattttttaaaaattaggtcttaaaatgcttacatttacaaatctgatcaatagttgcaacctcttgttactgtttgcttttataaattgaccattagatgcttgtgctcatgagttgacacattgaaattatgcaaggttgaattttgaaaaatctctgtcaccatatttaatggttcaagggaatgaaaggattctagttacataggcctaaaggacataatgaaatttaaaatttgtttcccttagaaaagattaagatatattttcttaaaagatattaagaaaggtattcttccatatcctaagttcccttagtaagtttccatgattagcatcaattgttgaagtgaagttaatttatgtgtgtcttaccgaatttactgtggataaaggatgactcaaataagtatacacttggc

SEQ ID NO: 72 - DNA, 1172 bp, Homo sapien; identical to SEQ ID NO: 71

SEQ ID NO: 73 - DNA, 381 bp, Homo sapien
ctcatagagccaaaatcatgaaaattgctactaaaaaacgaaatagtgttcatgttacttttaggccatccactgagtccgttcagttttataatcctctggaaaacaaagaggctccatggaagatgagactgcggaagctcggtggctttagtagtggtagcagcaatagcagcactagcaacacccataccagcacaaatagtgctacagagctagtaaaacctggtgtgtacagacctctagatacacttggtactgcatcagtaagcagcaaaacagtgaaggaatccacagagattcccaccaccatattacaaaaagaaggaattgcaagtagtcaattaggtagtcgtagtactcttaggtcatcaagtcatg

SEQ ID NO: 74 - DNA, 763 bp, Homo sapien
ctcatagagccaaaatcatgaaaattgctactaaaaaacgaaatagtgttcatgttacttttaggccatccactgagtccgttcagttttataatcctctggaaaacaaagaggctccatggaagatgagactgcggaagctcggtggctttagtagtggtagcagcaatagcagcactagcaacacccataccagcacaaatagtgctacagagctagtaaaacctggtgtgtacagacctctagatacacttggtactgcatcagtaagcagcaaaacagtgaaggaatccacagagattcccaccaccatattacaaaaagaaggaattgcaagtagtcaattaggtagtcgtagtactcttaggtcatcaagtcatgaggcaggactacagcagggctccctggttggctgtttataaaactgttgtacatgctctttcgaagccgaaggcaaatgtttccccacagaggcagaacagaatgccaccagaggctccactgagggatctgtacagtcatgtaatgggctattttggaaggaaagctgcagtcaataaagaggacatgagccaaaaactgcctcctcttaatagtgatattggcggcagcagtgctaatgttcctgatctgatggatgagtttatagcagaacgacttcgaagtggtaatgcctcgactatgacaagaagaggaagtagtccaggcagcctggaaattcccaaagacctgtctgatattctaaacaagcagaaccagatcg

SEQ ID NO: 75 - DNA, 2685 bp, Homo sapien
ttgaagtgttctgcaaagacatattcttaattgcttaagacatctcaataggatcttcaccccttactgaactttttgtttttgtttataaacattcagtaacttcagtttaagcacaaaacatttcatagatatgaaagtgctagcataattatttcctagtttgaagtatcaatgaggtgctacattggctaacaaatatgctgaaagtctccctgtaaagtaaggacatgtatgtgtacagttaaacctgcaacctgtgtggtgtttttgtttgtaaaacacataaagaaaattttcatgtacttaagacccagaaaatctggattaaaatgccttaaaatatccagaatctcttgctgttattgttttcagatttttttttctgaaggacttttatttttaatgtgattttaattaattactcattttgtttaggaaatatttgaaagcctacagtgtgcaaggttctgtagtattgctgcatattagagaatgataatttatagaaataaagcacagagatgaaaaactactttataaatgacacaaagaactttcctatttgattttgttttacttctaaaattgtatatctactaattctactggttacctgcttgcttatgattgaataagatacctgcaaaagtttaagttaatgaaaacaaaagcattgtttatgtcttttaaattaagacattttgggggagtcagtttgcctttttttaactgacattcagaggagaattcttgtcctcccctcatccacaaatttatcttgctccttcttaaagccgtctttaaatacctagcatgtatatgatctcatagtgctgagttcctttttttgttttgttttgtttataagggcatctagtgaaactgacttcctttttgaaacccgtggttccaaaactgtttggaactgtttggtgctgtttttcaagtttgagtagtgaaggctcttttcttggttgtaccctgaatcctagagataggaattggtccttctcacctgcttcttgaccccttccctgcatgctgatggtgctttggatccctgttctttctggctcaaagattttgcttcccactgctttttccagggttctagccctgggaatgatgattggcgctttcttgctaatataatgacatgagccaccagattgctgggttttaaatacattagtaggctattgtaacaagcaagtttggggcttgctttttccctcgaaagatcttattaagggatgggatccttgctgcagattagtagcagaaagattatttctcaggggatgagaggctggataactgtagtaatgctcttgctgtttcctacaggctcctacccagagattctacccagtgaaactcccacagcaacgcaggtagatggggctgacctggcctctccaatgtctcctcgaactagcaaaagccgcatgtccatgaagctgcgtcgttcctctggctcagccaataaatcctaaggagacaagcagcccagcagtgatcagcagtagccaccttagcacgaacatagggttaaccctttcaggccttcatgtctgccataacatgcatgtttcttcctgtacatttatttgagaaaacactggatttaaataattttaaataatttgtagcttaatattaaagatttaagttatttattgtttcattttttttcccacaatccaagctgccatattttgagggcagggggagttttattctacaccctttaccttcctagataattatgtctaagtagttttatctttaatttcatggttaactgtgagccaaaatacaattggacaattagtctcattatttattgtgccccattgcaactttatggttcaataaatatataattttttacaaatgtaaaattttacatttaagcatttgtaaagttacagcaaaagatgtacctgttaatacacagaatgtgtacagattatttgttatgacaataaaacactcaaaataaatggtctttagcatctcaaattccaactgaaatcattttagtattaactcttcttcccaaagcaatgtctcatttcttggctgtgcaggtgatgccatgttatatccaataactagaaaaatcactgtgctgaacttttatgtttagcttccaagtatttttctaatgttttgcatttcaagtggtatcactgttaaatgccatttgttttcagattgtggccttttattattggctgctagatcctggtgtttctatgttcttttttaagcaccaaaaagaagatggggaagaaaagaaggaaaattttctgatataaatatgttgttcaaattatgagtattatttaaaaaagaaaaaggaacataacccaggagtctaagttaaatctaatattgttaatactgaacttgcaggtccaggttggtatacattccaccctctagaagtattttcttacagtagataagctgctcacattttgttttgaatgggcatctcctgaggaaatgtagcatgacattggtactaactgcatgtgtaaatacatcatactggcaaaccgtaaaatataaattatgtatcatcattcatgtagtatctataatttgtaacagtgggggggaaagatgacatggtatttaataatacaataaaaatattcttatcacttccta

SEQ ID NO: 76 - DNA, 4594 bp, Homo sapien
gcgggaaggtgttcgtcttttcttactatggttgcaagctcttcagaataactgtagcaaagaacagctctggatgttttcatgcttaatccctggattttcagcaccacagtctgaacatggacctcgaactttagataatctcattaatcctccactcaaccttcaagaaactcaagtcactatagaagaaatcactcctcttgtccccccacaatcaggagataaagggcaagaagatctcacaagctattttcttgaagcacttctaaaatacatagtcattcaggtaaaaagtttagaatggaagaacaaagaaaaccaagaaaggggattttcatttttgttttcacattttaagaaatattacttgccttatatttttccaaacatctgtaaggaaaacagtttatatcatcctatacttgacatcccgcagatgagaccaaagccacattatgtcgtgataaagaaagatgctgaaaccaatgaagcaatctattgtacaaaggagcctttcattaaggctcgtgttattgtcattcgttggctggtttctttctggctggagccaaaaccacatacaggacctcatattcctgggatggaaggtgaagtcttgccaaagaatattcagagagcagctgctagtttagtatccagagaagaaagcaaaaatgataatgctgataaaacagacagaactacagaacccgaacagtctcattccaatacaagcactctcacggagcgagaacctagctcatctagtctctgtagtattgatgaagaacatctcacagacattgaaatagttcgcagagttttttcttctaaaaggagtaatgtaaactttgtgacagagatatttcgtcaggcatttttattaccaatttgtgaagcagcagctatgagaaaagtggtaaaagtatatcaagaatggatccaacaagaggaaaaacctttgttcatgcaagagcctgaagaaattgtgatcacttcttcagacctcccttgcattgaaaatgtcacagaccatgatatttcaatggaagaaggagaaaaaagagaagaggaaaatgggaccaatactgctgatcatgttcgaaattccagttgggcaaaaaacggctcctaccaaggtgctcttcataacgcctctgaagaagccacagaacaaaacatacgagctggtacccaggcagttttgcaggtgtttattataaactcatcaaatatatttcttcttgaacctgcaaatgaaataaaaaatcttctggatgaacacacagatatgtgtaaacgcattcttaacatttatcggtacatggttgtacaagtatcaatggacaaaaagacttgggaacagatgctgcttgtgttgctcagagtcacggaatctgtactgaagatgccatcacaagcttttctacagttccaagggaaaaaaaatatgaccttggcaggtcgacttgcaggaccacttttccagacccttatagttgcctggatcaaagcaaacctaaatgtgtacatctcccgagaactttgggatgacttactgtcagtattgtcatcgctgacctattgggaagagttggccactgagtggtcactgactatggagacattaactaaagttttagctaggaatttatatagtttggatctcagtgatttaccattggataagctgagtgaacagaaacaaaaaaagcacaaagggaaaggagttggacatgaatttcagaaagtttcagttgacaagtcattttctagaggatggagtcgtgatcagcctggccaagccccaatgagacagaggagtgcaacaaccactggttctccaggaaccgaaaaggcgaggagtatagtacggcaaaaaactgtcgccatgagaagccgatccattggtgaatgtgctctgccatcggcctatatacgcagtgctaaaagtgctcctgttctgatccatacttccaaacccttcttgcctgatattgttctcactcccctttctgatgagctttcagatattgatgatgctcaaatacttccccgctcaactagagtcagacatttttcacaaagtgaagaaactggaaatgaagtttttggtgctttgaatgaggagcagccattgcctcgaagtagcagcacttctgacatcttggaaccattcactgttgaacgagccaaagtcaataaagaggacatgagccaaaaactgcctcctcttaatagtgatattggcggcagcagtgctaatgttcctgatctgatggatgagtttatagcagaacgacttcgaagtggtaatgcctcgactatgacaagaagaggaagtagtccaggcagcctggaaattcccaaagacctccctgatattctaaacaagcagaaccagatgcgccctattgatgacccaggtgtgccctcagaatggacttctcctgccagtgcagggagcagtgatcttatcagctcagatagtcattcggattctttcagcgctttccaatatgatggccgaaaatttgacaattttggctttggaaccgacactggggttacgtcctctgctgatgtggattcaggttctggccatcatcagagtgctgaagagcaggaagtggctagtctaactactcttcatatagattctgaaacaagcagtcttaatcagcaagctttctctgctgaagttgcaactattactggttcagaaagtgcttccccagtccactcacctctgggctccaggtcacagactccttccccttctacattgaatatagatcacatggaacagaaggatctgcagctcgacgagaagctccaccactctgttcttcagacaccagatgatctaggcaatatttcaaaattagatatttaccttttttcttttagggcgtcagtgtcaggagatcataaataaggcatcttacatttgattatatatgattattgtaaatattttggacttttctaagtcctttggaaatttgttaatgtaacttttttcttgttcttaaagatatttgttgtctgagttttattcattttattatagttgattagagtcctcaaattagttattgcattattttcaagtattgtattatcatttattgatattggtagtgtttcctaaaacaggaaatacataatttggcatccttattcttagttttatacctaaagaacctagtaactcacaggagaacgtagtaacattatcacttgttaatcaagctttcagtgaaacagtttatcaaaccattttttttattttgattcagcaaatttgtcaactaaatttaatttaaaagtagaggtccaaatgaatattttcaagtaaatgttaaaaagtgacttgggaaacctaagtaactgccaagttttttttaaagttatttttgctagattttgtataatgtaacaaacatcagacaaatatgcacatttatggcatatgcaaatatgccataaattggtcaaagacacagttaatgagatatttacaatgaatgaaaagctagttttcattgataaggtagcacatttattctctgacgaaaggaagaaatttaaaactatataacttctaaacttcttttaagaaacccgtttattttaaaactaactgtagaggtgaggtttcaccatgttgcccaggctggtcttrrgcttctgrgctcargtgacccgcctgcctcggcctcccaagattrcgggtgtgagccaccacacccggcccaagggacccattcgttaacttgcaattgccttgtaattatatagccctaattttctggtttgtggattatttctgaccttttctttttctcctttgatctgcagttgtttatttgtttacagttatttccccaacatttggaaaaaaacttcagttatagaagtgtttcaaggctagtaaaatgaatgcacataaaccctttatataaattcatcaattaatattttgccactttgtctatatttacacacagcacatatatgcacaaaatagcctgcccttcccacatgtctccctaaccttttatttttgctgaggcatgtaagaggaaattgcaaatatcagatccttcagacctaaacatgtcagtggatatgtcctaataagtgtatgttttctgcgtaaccacaatataatggccatattcatgatatttaacatagatacattgctgttattttagtctatagtcgtaagtcctcaattgtcccaataatgccctttatagctaccccacaccgtcagcaatccaataaagaatttaatcaggctgggcaccgtggctcacgcctgtcatcccagcactttgggaggcaaaggcaggtggatcacctgaggtcaggagttcgagaccagtctggtcaacatggtgaaaccctgtctctactaaaaatacaaaaattagctgatcatggtggcacacgcctgtcatcccagctactcggtaggctgaggcaggaaaattacttaaacctgggatgtggaggttgcagtgaactgaggtcgtgctgccactgtactccaacctgggtaacagagtgagactgtctc

SEQ ID NO: 77 - DNA, 1155 bp, Homo sapien
ctacatttgaaaattttcttaataaaaaattgggaagaaaggggctttttaaaaagtcattacatgactcgtattgccagcaacatagtgaacttgatattctggagctattagatattcttgctagcatttcgtcgtaccactggtttgcaaatagagaaacctctaagactcttcttactcatttccttgaccaaaataaaactatgagtggaaaatggagtgatgagcagtaagcacactggaaaagtgggatgatcttgaagcaaattgctgataatcacttctgggattcagactgagacttgagcaagcttcaaggttggatgactgaattgaagacttccatgttaaattggttatcttgagaaggatacaagttaatttcagatattgatgatgctcaaatacttccccgctcaactagagtcagacatttttcacaaagtgaagaaactggaaatgaagtttttggtgctttgaatgaggagcagccattgcctcgaagtagcagcacttctgacatcttggaaccattcactgttgaacgagccaaaggtgcagttcctgtcattgacagttcatcccgtcatgcaccaagcttgcagagttccacagaggcttcttcaataactagatccactgaaagccacatcactgatactcatagtagagagtcttctctggaagttggtgatagcatatatgaccatctttgtcatttaataggtccagtagaacttgcagattcagcttttgaacaaatccagtacattgaccttgaaggagatgatgatcttctttccaccctgaaagaatattttaaggaaaaccaggaaaatcatagtaaaaatgagacagggaaagacccagcttctcaggaagtgactattgcagtaaataggggtgaaagattatccttagataaattagaatgcacagatcaggaaactgaatcagaaaatatcacctcttttgttgggactcctgaaaacctacagtttcagaaagaaccaaactcagctgtcttcatgagtaatatcgcacctaaccagtcagacagtttttttagaacacaaacttctgaaaaatctaagcaactaaacactgataaacagccatcagagcctagtttagatagcccttgtgataaag

SEQ ID NO: 78 - DNA, 7096 bp, Homo sapien
gcgggaaggtgttcgtcttttcttactatggttgcaagctcttcagaataactgtagcaaagaacagctctggatgttttcatgcttaatccctggattttcagcaccacagtctgaacatggacctcgaactttagataatctcattaatcctccactcaaccttcaagaaactcaagtcactatagaagaaatcactcctcttgtccccccacaatcaggagataaagggcaagaagatctcacaagctattttcttgaagcacttctaaaatacatagtcattcaggtaaaaagtttagaatggaagaacaaagaaaaccaagaaaggggattttcatttttgttttcacattttaagaaatattacttgccttatatttttccaaacatctgtaaggaaaacagtttatatcatcctatacttgacatcccgcagatgagaccaaagccacattatgtcgtgataaagaaagatgctgaaaccaatgaagcaatctattgtacaaaggagcctttcattaaggctcgtgttattgtcattcgttggctggtttctttctggctggagccaaaaccacatacaggacctcatattcctgggatggaaggtgaagtcttgccaaagaatattcagagagcagctgctagtttagtatccagagaagaaagcaaaaatgataatgctgataaaacagacagaactacagaacccgaacagtctcattccaatacaagcactctcacggagcgagaacctagctcatctagtctctgtagtattgatgaagaacatctcacagacattgaaatagttcgcagagttttttcttctaaaaggagtaatgtaaactttgtgacagagatatttcgtcaggcatttttattaccaatttgtgaagcagcagctatgagaaaagtggtaaaagtatatcaagaatggatccaacaagaggaaaaacctttgttcatgcaagagcctgaagaaattgtgatcacttcttcagacctcccttgcattgaaaatgtcacagaccatgatatttcaatggaagaaggagaaaaaagagaagaggaaaatgggaccaatactgctgatcatgttcgaaattccagttgggcaaaaaacggctcctaccaaggtgctcttcataacgcctctgaagaagccacagaacaaaacatacgagctggtacccaggcagttttgcaggtgtttattataaactcatcaaatatatttcttcttgaacctgcaaatgaaataaaaaatcttctggatgaacacacagatatgtgtaaacgcattcttaacatttatcggtacatggttgtacaagtatcaatggacaaaaagacttgggaacagatgctgcttgtgttgctcagagtcacggaatctgtactgaagatgccatcacaagcttttctacagttccaagggaaaaaaaatatgaccttggcaggtcgacttgcaggaccacttttccagacccttatagttgcctggatcaaagcaaacctaaatgtgtacatctcccgagaactttgggatgacttactgtcagtattgtcatcgctgacctattgggaagagttggccactgagtggtcactgactatggagacattaactaaagttttagctaggaatttatatagtttggatctcagtgatttaccattggataagctgagtgaacagaaacaaaaaaagcacaaagggaaaggagttggacatgaatttcagaaagtttcagttgacaagtcattttctagaggatggagtcgtgatcagcctggccaagccccaatgagacagaggagtgcaacaaccactggttctccaggaaccgaaaaggcgaggagtatagtacggcaaaaaactgtcgatattgatgatgctcaaatacttccccgctcaactagagtcagacatttttcacaaagtgaagaaactggaaatgaagtttttggtgctttgaatgaggagcagccattgcctcgaagtagcagcacttctgacatcttggaaccattcactgttgaacgagccaaagtcaataaagaggacatgagccaaaaactgcctcctcttaatagtgatattggcggcagcagtgctaatgttcctgatctgatggatgagtttatagcagaacgacttcgaagtggtaatgcctcgactatgacaagaagaggaagtagtccaggcagcctggaaattcccaaagacctccctgatattctaaacaagcagaaccagatgcgccctattgatgacccaggtgtgccctcagaatggacttctcctgccagtgcagggagcagtgatcttatcagctcagatagtcattcggattctttcagcgctttccaatatgatggccgaaaatttgacaattttggctttggaaccgacactggggttacgtcctctgctgatgtggattcaggttctggccatcatcagagtgctgaagagcaggaagtggctagtctaactactcttcatatagattctgaaacaagcagtcttaatcagcaagctttctctgctgaagttgcaactattactggttcagaaagtgcttccccagtccactcacctctgggctccaggtcacagactccttccccttctacattgaatatagatcacatggaacagaaggatctgcagctcgacgagaagctccaccactctgttcttcagacaccagatgatctagaaattagtgaatttccatcagaatgttgtagtgtgatggcaggaggtactctgactggatggcatgctgatgttgctactgtaatgtggcgaagaatgctaggcattttgggagatgtaaattcaatcatggatcctgaaatacatgctcaagtttttgattacctctgtgaactttggcagaatctagctaagattagagataaccttggcatttcaactgataacctgacctccccttctccaccagttttaattcctccactgagaattcttacaccttggctttttaaggcaaccatgttgactgataaatataaacaaggtaaattacatgcatataaacttatttgtaatacaatgaaaagaagacaagatgtttctccaaatagagattttctaacacatttctacaatataatgcattgtggattacttcatattgaccaggatattgtcaatacaatcatcaaacactgctcacctcaatttttttcacttggtttgcctggtgccacaatgcttattatggattttattgtagcagctggtagagtggcttcttcagcttttctcaatgcaccaagagtagaagcacaagttcttctgggatctttggtttgctttcccaacttatattgtgaactgccttctcttcatcccaacattcctgatgttgctgtgtctcagtttacagatgttaaggaacttataatcaaaactgtattaagctcggcaagagatgagccctctggtcctgcacgatgtgtagcactttgtagtttaggtatttggatttgtgaagaactagtccatgagtctcatcatcctcaaattaaggaagctctgaatgtgatttgtgtttccttaaagtttactaataaaacagtagcccacgtagcttgtaacatgcttcacatgctggttcattatgtacctagacttcagatttaccagcctgattctcccttgaaaattattcaaatcctaatagctaccatcacccatcttttaccaagtacagaggcttcatcttatgaaatggacaagaggttggtagtatctttacttctctgccttctggactggatcatggccttacctctaaagacactgctccaaccatttcatgctacgggagcagaaagcgataaaacagaaaaatctgttctcaattgcatttataaggttttacatgggtgtgtttatggagctcagtgttttagcaatccaaggtattttcccatgagcctctctgatttggcatctgtagattatgatccttttatgcatttggaaagtctgaaagagcctgagcctctgcactctcctgactcagaacgatcttctaaactccagccagtaacagaagtgaaaactcaaatgcagcatggattaatctctatagcagcccgcactgttattacacatctggtaaatcacctgggccattatccaatgagcggtggtcctgctatgctaacaagtcaggtgtgtgaaaatcacgacaatcattacagtgaaagtactgaactttctcctgaactctttgagagtccaaatatccagttctttgtgttaaataatacaaccttagtgtcctgtatccagatcagatcagaagagaatatgcctggaggaggtttatctgctggccttgcatcagccaattcaaatgtcagaatcatagtacgtgatctctctggaaaatattcatgggattctgctatactgtatggcccacctcctgtaagtggcttgtcagaacctacatctttcatgctttcattgtctcaccaagagaagccagaagagcctccgacatctaatgaatgcttagaagatataaccgtaaaagatggactttctctccagtttaaaagatttagagaaactgtaccaacttgggatacaataagagatgaagaagatgttcttgatgagctcttgcagtatttgggtgttactagtcctgaatgcttacagagaactggaatctcacttaatattcctgctccacaacctgtgtgcatttctgaaaaacaagaaaatgatgttattaatgctatccttaagcaacatacagaagaaaaagaatttgttgagaagcactttaatgacttaaacatgaaagctgtggaacaagatgaaccaatacctcaaaaacctcagtcagcattttattattgcagattgcttcttagtatattgggaatgaattcctgggacaaacggaggagctttcatctcctgaagaaaaatgaaaagctacttagagaacttaggaacttggattcaaggcagtgccgagagacacacaagattgcagtattttatgttgctgaaggacaagaagacaaacactccattctcaccaatacaggaggaagtcaagcatatgaagattttgtagctggtcttggttgggaggtaaatcttacaaaccattgtggttttatgggaggactacaaaaaaacaaaagcactggattgaccactccatattttgctacctctacagtagaggtaatatttcacgtgtcaacaagaatgccttctgattctgatgattctttgaccaaaaaattgagacatttgggaaatgatgaagtgcacattgtttggtcagagcatactagagactacaggagaggaattattcccacagaatttggtgatgtccttattgtaatatatccaatgaaaaatcacatgttcagtattcagataatgaaaaaaccagaggttcccttctttggtcccctttttgatggtgctattgtgaatggaaaggttctacccattatggttagagcaacagctataaatgcaagccgtgctctgaaatctctgattccattgtatcaaaacttctatgaggagagagcacgatacctgcaaacaattgtccagcaccacttagaaccaacaacatttgaagattttgcagcacaggttttttctccagctccctaccaccatttaccatctgatgccgatcattaaatatcagttctgtttatctgaagggctcctacccagagattctacccagtgaaactcccacagcaacgcaggtagatggggctgacctggcctctccaatgtctcctcgaactagcaaaagccgcatgtccatgaagctgcgtcgttcctctggctcagccaataaatcctaaggagacaagcagcccagcagtgatcagcagtagccaccttagcacgaacatagggttaaccctttcaggccttcatgtctgccataacatgcatgtttcttcctgtacatttatttgagaaaacactggatttaaataattttaaataatttgtagcttaatattaaagatttaagttatttattgtttcattttttttcccacaatccaagctgccatattttgagggcagggggagttttattctacaccctttaccttcctagataattatgtctaagtagttttatctttaatttcatggttaactgtgagccaaaatacaattggacaattagtctcattatttattgtgccccattgcaactttatggttcaataaatatataattttttacaaatgtaaaattttacatttaagcatttgtaaagttacagcaaaagatgtacctgttaatacacagaatgtgtacagattatttgttatgacaataaaacactcaaaataaatggtctttagcatctcaaattccaactgaaatcattttagtattaactcttcttcccaaagcaatgtctcatttcttggctgtgcaggtgatgccatgttatatccaataactagaaaaatcactgtgctgaacttttatgtttagcttccaagtatttttctaatgttttgcatttcaagtggtatcactgttaaatgccatttgttttcagattgtggccttttattattggctgctagatcctggtgtttctatgttcttttttaagcaccaaaaagaagatggggaagaaaagaaggaaaattttctgatataaatatgttgttcaaattatgagtattatttaaaaaagaaaaaggaacataacccaggagtctaagttaaatctaatattgttaatactgaacttgcaggtccaggttggtatacattccaccctctagaagtattttcttacagtagataagctgctcacattttgttttgaatgggcatctcctgaggaaatgtagcatgacattggtactaactgcatgtgtaaatacatcatactggcaaaccgtaaaatataaattatgtatcatcattcatgtagtatctataatttgtaacagtgggggggaaagatgacatggtatttaataatacaataaaaatattcttatcacttccta

SEQ ID NO: 79 - DNA, 6240 bp, Homo sapien
tattaattaagatgtcatataatttctgaaattgagattggtatgattctcaatatgtagttactcaacatattataaagatggatttgattgatttgatatagttattctccatattataaagatggatttgattggattccatctgggtagaactatattgtgtagatgagtgttcttcagatagctccttaaggtcactacttaatttgtggttgcggagacgggagcattctccacattatcacttccagttcctcagcttttgaataggtttttatttgatgagaggatattgtggccgataaatgattttaaatgattgatgtagatacataaaatgtaattttaatttttaatatttaaggaactctaaayatttgaaattgtctttcaaagatgtttaatatttgaatttttataagaagtatgtatttgaaagttaactattaaccaaatgcaaacatatgcaagaaggaaacattaatcagtctttttattttaagggaacagatgctgcttgtgttgctcagagtcacggaatctgtactgaagatgccatcacaagcttttctacagttccaagggaaaaaaaatatgaccttggcaggtcgacttgcaggaccacttttccagacccttatagttgcctggatcaaagcaaacctaaatgtgtacatctcccgagaactttgggatgacttactgtcagtattgtcatcgctgacctattgggaagagttggccactgagtggtcactgactatggagacattaactaaagttttagctaggaatttatatagtttggatctcagtgatttaccattggataagctgagtgaacagaaacaaaaaaagcacaaagggaaaggagttggacatgaatttcagaaagtttcagttgacaagtcattttctagaggatggagtcgtgatcagcctggccaagccccaatgagacagaggagtgcaacaaccactggttctccaggaaccgaaaaggcgaggagtatagtacggcaaaaaactgtcgatattgatgatgctcaaatacttccccgctcaactagagtcagacatttttcacaaagtgaagaaactggaaatgaagtttttggtgctttgaatgaggagcagccattgcctcgaagtagcagcacttctgacatcttggaaccattcactgttgaacgagccaaagtcaataaagaggacatgagccaaaaactgcctcctcttaatagtgatattggcggcagcagtgctaatgttcctgatctgatggatgagtttatagcagaacgacttcgaagtggtaatgcctcgactatgacaagaagaggaagtagtccaggcagcctggaaattcccaaagacctccctgatattctaaacaagcagaaccagatgcgccctattgatgacccaggtgtgccctcagaatggacttctcctgccagtgcagggagcagtgatcttatcagctcagatagtcattcggattctttcagcgctttccaatatgatggccgaaaatttgacaattttggctttggaaccgacactggggttacgtcctctgctgatgtggattcaggttctggccatcatcagagtgctgaagagcaggaagtggctagtctaactactcttcatatagattctgaaacaagcagtcttaatcagcaagctttctctgctgaagttgcaactattactggttcagaaagtgcttccccagtccactcacctctgggctccaggtcacagactccttccccttctacattgaatatagatcacatggaacagaaggatctgcagctcgacgagaagctccaccactctgttcttcagacaccagatgatctagaaattagtgaatttccatcagaatgttgtagtgtgatggcaggaggtactctgactggatggcatgctgatgttgctactgtaatgtggcgaagaatgctaggcattttgggagatgtaaattcaatcatggatcctgaaatacatgctcaagtttttgattacctctgtgaactttggcagaatctagctaagattagagataaccttggcatttcaactgataacctgacctccccttctccaccagttttaattcctccactgagaattcttacaccttggctttttaaggcaaccatgttgactgataaatataaacaaggtaaattacatgcatataaacttatttgtaatacaatgaaaagaagacaagatgtttctccaaatagagattttctaacacatttctacaatataatgcattgtggattacttcatattgaccaggatattgtcaatacaatcatcaaacactgctcacctcaatttttttcacttggtttgcctggtgccacaatgcttattatggattttattgtagcagctggtagagtggcttcttcagcttttctcaatgcaccaagagtagaagcacaagttcttctgggatctttggtttgctttcccaacttatattgtgaactgccttctcttcatcccaacattcctgatgttgctgtgtctcagtttacagatgttaaggaacttataatcaaaactgtattaagctcggcaagagatgagccctctggtcctgcacgatgtgtagcactttgtagtttaggtatttggatttgtgaagaactagtccatgagtctcatcatcctcaaattaaggaagctctgaatgtgatttgtgtttccttaaagtttactaataaaacagtagcccacgtagcttgtaacatgcttcacatgctggttcattatgtacctagacttcagatttaccagcctgattctcccttgaaaattattcaaatcctaatagctaccatcacccatcttttaccaagtacagaggcttcatcttatgaaatggacaagaggttggtagtatctttacttctctgccttctggactggatcatggccttacctctaaagacactgctccaaccatttcatgctacgggagcagaaagcgataaaacagaaaaatctgttctcaattgcatttataaggttttacatgggtgtgtttatggagctcagtgttttagcaatccaaggtattttcccatgagcctctctgatttggcatctgtagattatgatccttttatgcatttggaaagtctgaaagagcctgagcctctgcactctcctgactcagaacgatcttctaaactccagccagtaacagaagtgaaaactcaaatgcagcatggattaatctctatagcagcccgcactgttattacacatctggtaaatcacctgggccattatccaatgagcggtggtcctgctatgctaacaagtcaggtgtgtgaaaatcacgacaatcattacagtgaaagtactgaactttctcctgaactctttgagagtccaaatatccagttctttgtgttaaataatacaaccttagtgtcctgtatccagatcagatcagaagagaatatgcctggaggaggtttatctgctggccttgcatcagccaattcaaatgtcagaatcatagtacgtgatctctctggaaaatattcatgggattctgctatactgtatggcccacctcctgtaagtggcttgtcagaacctacatctttcatgctttcattgtctcaccaagagaagccagaagagcctccgacatctaatgaatgcttagaagatataaccgtaaaagatggactttctctccagtttaaaagatttagagaaactgtaccaacttgggatacaataagagatgaagaagatgttcttgatgagctcttgcagtatttgggtgttactagtcctgaatgcttacagagaactggaatctcacttaatattcctgctccacaacctgtgtgcatttctgaaaaacaagaaaatgatgttattaatgctatccttaagcaacatacagaagaaaaagaatttgttgagaagcactttaatgacttaaacatgaaagctgtggaacaagatgaaccaatacctcaaaaacctcagtcagcattttattattgcagattgcttcttagtatattgggaatgaattcctgggacaaacggaggagctttcatctcctgaagaaaaatgaaaagctacttagagaacttaggaacttggattcaaggcagtgccgagagacacacaagattgcagtattttatgttgctgaaggacaagaagacaaacactccattctcaccaatacaggaggaagtcaagcatatgaagattttgtagctggtcttggttgggaggtaaatcttacaaaccattgtggttttatgggaggactacaaaaaaacaaaagcactggattgaccactccatattttgctacctctacagtagaggtaatatttcacgtgtcaacaagaatgccttctgattctgatgattctttgaccaaaaaattgagacatttgggaaatgatgaagtgcacattgtttggtcagagcatactagagactacaggagaggaattattcccacagaatttggtgatgtccttattgtaatatatccaatgaaaaatcacatgttcagtattcagataatgaaaaaaccagaggttcccttctttggtcccctttttgatggtgctattgtgaatggaaaggttctacccattatggttagagcaacagctataaatgcaagccgtgctctgaaatctctgattccattgtatcaaaacttctatgaggagagagcacgatacctgcaaacaattgtccagcaccacttagaaccaacaacatttgaagattttgcagcacaggttttttctccagctccctaccaccatttaccatctgatgccgatcattaaatatcagttctgtttatctgaagggctcctacccagagattctacccagtgaaactcccacagcaacgcaggtagatggggctgacctggcctctccaatgtctcctcgaactagcaaaagccgcatgtccatgaagctgcgtcgttcctctggctcagccaataaatcctaaggagacaagcagcccagcagtgatcagcagtagccaccttagcacgaacatagggttaaccctttcaggccttcatgtctgccataacatgcatgtttcttcctgtacatttatttgagaaaacactggatttaaataattttaaataatttgtagcttaatattaaagatttaagttatttattgtttcattttttttcccacaatccaagctgccatattttgagggcagggggagttttattctacaccctttaccttcctagataattatgtctaagtagttttatctttaatttcatggttaactgtgagccaaaatacaattggacaattagtctcattatttattgtgccccattgcaactttatggttcaataaatatataattttttacaaatgtaaaattttacatttaagcatttgtaaagttacagcaaaagatgtacctgttaatacacagaatgtgtacagattatttgttatgacaataaaacactcaaaataaatggtctttagcatctcaaattccaactgaaatcattttagtattaactcttcttcccaaagcaatgtctcatttcttggctgtgcaggtgatgccatgttatatccaataactagaaaaatcactgtgctgaacttttatgtttagcttccaagtatttttctaatgttttgcatttcaagtggtatcactgttaaatgccatttgttttcagattgtggccttttattattggctgctagatcctggtgtttctatgttcttttttaagcaccaaaaagaagatggggaagaaaagaaggaaaattttctgatataaatatgttgttcaaattatgagtattatttaaaaaagaaaaaggaacataacccaggagtctaagttaaatctaatattgttaatactgaacttgcaggtccaggttggtatacattccaccctctagaagtattttcttacagtagataagctgctcacattttgttttgaatgggcatctcctgaggaaatgtagcatgacattggtactaactgcatgtgtaaatacatcatactggcaaaccgtaaaatataaattatgtatcatcattcatgtagtatctataatttgtaacagtgggggggaaagatgacatggtatttaataatacaataaaaatattcttatcacttccta

SEQ ID NO: 80 - DNA, 6748 bp, Homo sapien
gcgggaaggtgttcgtcttttcttactatggttgcaagctcttcagaataactgtagcaaagaacagctctggatgttttcatgcttaatccctggattttcagcaccacagtctgaacatggacctcgaactttagataatctcattaatcctccactcaaccttcaagaaactcaagtcactatagaagaaatcactcctcttgtccccccacaatcaggagataaagggcaagaagatctcacaagctattttcttgaagcacttctaaaatacatagtcattcagagagcagctgctagtttagtatccagagaagaaagcaaaaatgataatgctgataaaacagacagaactacagaacccgaacagtctcattccaatacaagcactctcacggagcgagaacctagctcatctagtctctgtagtattgatgaagaacatctcacagacattgaaatagttcgcagagttttttcttctaaaaggagtaatgtaaactttgtgacagagatatttcgtcaggcatttttattaccaatttgtgaagcagcagctatgagaaaagtggtaaaagtatatcaagaatggatccaacaagaggaaaaacctttgttcatgcaagagcctgaagaaattgtgatcacttcttcagacctcccttgcattgaaaatgtcacagaccatgatatttcaatggaagaaggagaaaaaagagaagaggaaaatgggaccaatactgctgatcatgttcgaaattccagttgggcaaaaaacggctcctaccaaggtgctcttcataacgcctctgaagaagccacagaacaaaacatacgagctggtacccaggcagttttgcaggtgtttattataaactcatcaaatatatttcttcttgaacctgcaaatgaaataaaaaatcttctggatgaacacacagatatgtgtaaacgcattcttaacatttatcggtacatggttgtacaagtatcaatggacaaaaagacttgggaacagatgctgcttgtgttgctcagagtcacggaatctgtactgaagatgccatcacaagcttttctacagttccaagggaaaaaaaatatgaccttggcaggtcgacttgcaggaccacttttccagacccttatagttgcctggatcaaagcaaacctaaatgtgtacatctcccgagaactttgggatgacttactgtcagtattgtcatcgctgacctattgggaagagttggccactgagtggtcactgactatggagacattaactaaagttttagctaggaatttatatagtttggatctcagtgatttaccattggataagctgagtgaacagaaacaaaaaaagcacaaagggaaaggagttggacatgaatttcagaaagtttcagttgacaagtcattttctagaggatggagtcgtgatcagcctggccaagccccaatgagacagaggagtgcaacaaccactggttctccaggaaccgaaaaggcgaggagtatagtacggcaaaaaactgtcgatattgatgatgctcaaatacttccccgctcaactagagtcagacatttttcacaaagtgaagaaactggaaatgaagtttttggtgctttgaatgaggagcagccattgcctcgaagtagcagcacttctgacatcttggaaccattcactgttgaacgagccaaagtcaataaagaggacatgagccaaaaactgcctcctcttaatagtgatattggcggcagcagtgctaatgttcctgatctgatggatgagtttatagcagaacgacttcgaagtggtaatgcctcgactatgacaagaagaggaagtagtccaggcagcctggaaattcccaaagacctccctgatattctaaacaagcagaaccagatgcgccctattgatgacccaggtgtgccctcagaatggacttctcctgccagtgcagggagcagtgatcttatcagctcagatagtcattcggattctttcagcgctttccaatatgatggccgaaaatttgacaattttggctttggaaccgacactggggttacgtcctctgctgatgtggattcaggttctggccatcatcagagtgctgaagagcaggaagtggctagtctaactactcttcatatagattctgaaacaagcagtcttaatcagcaagctttctctgctgaagttgcaactattactggttcagaaagtgcttccccagtccactcacctctgggctccaggtcacagactccttccccttctacattgaatatagatcacatggaacagaaggatctgcagctcgacgagaagctccaccactctgttcttcagacaccagatgatctagaaattagtgaatttccatcagaatgttgtagtgtgatggcaggaggtactctgactggatggcatgctgatgttgctactgtaatgtggcgaagaatgctaggcattttgggagatgtaaattcaatcatggatcctgaaatacatgctcaagtttttgattacctctgtgaactttggcagaatctagctaagattagagataaccttggcatttcaactgataacctgacctccccttctccaccagttttaattcctccactgagaattcttacaccttggctttttaaggcaaccatgttgactgataaatataaacaaggtaaattacatgcatataaacttatttgtaatacaatgaaaagaagacaagatgtttctccaaatagagattttctaacacatttctacaatataatgcattgtggattacttcatattgaccaggatattgtcaatacaatcatcaaacactgctcacctcaatttttttcacttggtttgcctggtgccacaatgcttattatggattttattgtagcagctggtagagtggcttcttcagcttttctcaatgcaccaagagtagaagcacaagttcttctgggatctttggtttgctttcccaacttatattgtgaactgccttctcttcatcccaacattcctgatgttgctgtgtctcagtttacagatgttaaggaacttataatcaaaactgtattaagctcggcaagagatgagccctctggtcctgcacgatgtgtagcactttgtagtttaggtatttggatttgtgaagaactagtccatgagtctcatcatcctcaaattaaggaagctctgaatgtgatttgtgtttccttaaagtttactaataaaacagtagcccacgtagcttgtaacatgcttcacatgctggttcattatgtacctagacttcagatttaccagcctgattctcccttgaaaattattcaaatcctaatagctaccatcacccatcttttaccaagtacagaggcttcatcttatgaaatggacaagaggttggtagtatctttacttctctgccttctggactggatcatggccttacctctaaagacactgctccaaccatttcatgctacgggagcagaaagcgataaaacagaaaaatctgttctcaattgcatttataaggttttacatgggtgtgtttatggagctcagtgttttagcaatccaaggtattttcccatgagcctctctgatttggcatctgtagattatgatccttttatgcatttggaaagtctgaaagagcctgagcctctgcactctcctgactcagaacgatcttctaaactccagccagtaacagaagtgaaaactcaaatgcagcatggattaatctctatagcagcccgcactgttattacacatctggtaaatcacctgggccattatccaatgagcggtggtcctgctatgctaacaagtcaggtgtgtgaaaatcacgacaatcattacagtgaaagtactgaactttctcctgaactctttgagagtccaaatatccagttctttgtgttaaataatacaaccttagtgtcctgtatccagatcagatcagaagagaatatgcctggaggaggtttatctgctggccttgcatcagccaattcaaatgtcagaatcatagtacgtgatctctctggaaaatattcatgggattctgctatactgtatggcccacctcctgtaagtggcttgtcagaacctacatctttcatgctttcattgtctcaccaagagaagccagaagagcctccgacatctaatgaatgcttagaagatataaccgtaaaagatggactttctctccagtttaaaagatttagagaaactgtaccaacttgggatacaataagagatgaagaagatgttcttgatgagctcttgcagtatttgggtgttactagtcctgaatgcttacagagaactggaatctcacttaatattcctgctccacaacctgtgtgcatttctgaaaaacaagaaaatgatgttattaatgctatccttaagcaacatacagaagaaaaagaatttgttgagaagcactttaatgacttaaacatgaaagctgtggaacaagatgaaccaatacctcaaaaacctcagtcagcattttattattgcagattgcttcttagtatattgggaatgaattcctgggacaaacggaggagctttcatctcctgaagaaaaatgaaaagctacttagagaacttaggaacttggattcaaggcagtgccgagagacacacaagattgcagtattttatgttgctgaaggacaagaagacaaacactccattctcaccaatacaggaggaagtcaagcatatgaagattttgtagctggtcttggttgggaggtaaatcttacaaaccattgtggttttatgggaggactacaaaaaaacaaaagcactggattgaccactccatattttgctacctctacagtagaggtaatatttcacgtgtcaacaagaatgccttctgattctgatgattctttgaccaaaaaattgagacatttgggaaatgatgaagtgcacattgtttggtcagagcatactagagactacaggagaggaattattcccacagaatttggtgatgtccttattgtaatatatccaatgaaaaatcacatgttcagtattcagataatgaaaaaaccagaggttcccttctttggtcccctttttgatggtgctattgtgaatggaaaggttctacccattatggttagagcaacagctataaatgcaagccgtgctctgaaatctctgattccattgtatcaaaacttctatgaggagagagcacgatacctgcaaacaattgtccagcaccacttagaaccaacaacatttgaagattttgcagcacaggttttttctccagctccctaccaccatttaccatctgatgccgatcattaaatatcagttctgtttatctgaagggctcctacccagagattctacccagtgaaactcccacagcaacgcaggtagatggggctgacctggcctctccaatgtctcctcgaactagcaaaagccgcatgtccatgaagctgcgtcgttcctctggctcagccaataaatcctaaggagacaagcagcccagcagtgatcagcagtagccaccttagcacgaacatagggttaaccctttcaggccttcatgtctgccataacatgcatgtttcttcctgtacatttatttgagaaaacactggatttaaataattttaaataatttgtagcttaatattaaagatttaagttatttattgtttcattttttttcccacaatccaagctgccatattttgagggcagggggagttttattctacaccctttaccttcctagataattatgtctaagtagttttatctttaatttcatggttaactgtgagccaaaatacaattggacaattagtctcattatttattgtgccccattgcaactttatggttcaataaatatataattttttacaaatgtaaaattttacatttaagcatttgtaaagttacagcaaaagatgtacctgttaatacacagaatgtgtacagattatttgttatgacaataaaacactcaaaataaatggtctttagcatctcaaattccaactgaaatcattttagtattaactcttcttcccaaagcaatgtctcatttcttggctgtgcaggtgatgccatgttatatccaataactagaaaaatcactgtgctgaacttttatgtttagcttccaagtatttttctaatgttttgcatttcaagtggtatcactgttaaatgccatttgttttcagattgtggccttttattattggctgctagatcctggtgtttctatgttcttttttaagcaccaaaaagaagatggggaagaaaagaaggaaaattttctgatataaatatgttgttcaaattatgagtattatttaaaaaagaaaaaggaacataacccaggagtctaagttaaatctaatattgttaatactgaacttgcaggtccaggttggtatacattccaccctctagaagtattttcttacagtagataagctgctcacattttgttttgaatgggcatctcctgaggaaatgtagcatgacattggtactaactgcatgtgtaaatacatcatactggcaaaccgtaaaatataaattatgtatcatcattcatgtagtatctataatttgtaacagtgggggggaaagatgacatggtatttaataatacaataaaaatattcttatcacttccta

SEQ ID NO: 81 - DNA, 5588 bp, Homo sapien
ctcatagagccaaaatcatgaaaattgctactaaaaaacgaaatagtgttcatgttacttttaggccatccactgagtccgttcagttttataatcctctggaaaacaaagaggctccatggaagatgagactgcggaagctcggtggctttagtagtggtagcagcaatagcagcactagcaacacccataccagcacaaatagtgctacagagctagtaaaacctggtgtgtacagacctctagatacacttggtactgcatcagtaagcagcaaaacagtgaaggaatccacagagattcccaccaccatattacaaaaagaaggaattgcaagtagtcaattaggtagtcgtagtactcttaggtcatcaagtcatgaggcaggactacagcagggctccctgggtggcgtttataaaactgttgtacatgctctttcgaagccgaaggcaaatgtttccccacagaggcagaacagaatgccaccagaggctccactgagggatctgtacagtcatgtaatgggctattttggaaggaaagctgcagtcaataaagaggacatgagccaaaaactgcctcctcttaatagtgatattggcggcagcagtgctaatgttcctgatctgatggatgagtttatagcagaacgacttcgaagtggtaatgcctcgactatgacaagaagaggaagtagtccaggcagcctggaaattcccaaagacctccctgatattctaaacaagcagaaccagatgcgccctattgatgacccaggtgtgccctcagaatggacttctcctgccagtgcagggagcagtgatcttatcagctcagatagtcattcggattctttcagcgctttccaatatgatggccgaaaatttgacaattttggctttggaaccgacactggggttacgtcctctgctgatgtggattcaggttctggccatcatcagagtgctgaagagcaggaagtggctagtctaactactcttcatatagattctgaaacaagcagtcttaatcagcaagctttctctgctgaagttgcaactattactggttcagaaagtgcttccccagtccactcacctctgggctccaggtcacagactccttccccttctacattgaatatagatcacatggaacagaaggatctgcagctcgacgagaagctccaccactctgttcttcagacaccagatgatctagaaattagtgaatttccatcagaatgttgtagtgtgatggcaggaggtactctgactggatggcatgctgatgttgctactgtaatgtggcgaagaatgctaggcattttgggagatgtaaattcaatcatggatcctgaaatacatgctcaagtttttgattacctctgtgaactttggcagaatctagctaagattagagataaccttggcatttcaactgataacctgacctccccttctccaccagttttaattcctccactgagaattcttacaccttggctttttaaggcaaccatgttgactgataaatataaacaaggtaaattacatgcatataaacttatttgtaatacaatgaaaagaagacaagatgtttctccaaatagagattttctaacacatttctacaatataatgcattgtggattacttcatattgaccaggatattgtcaatacaatcatcaaacactgctcacctcaatttttttcacttggtttgcctggtgccacaatgcttattatggattttattgtagcagctggtagagtggcttcttcagcttttctcaatgcaccaagagtagaagcacaagttcttctgggatctttggtttgctttcccaacttatattgtgaactgccttctcttcatcccaacattcctgatgttgctgtgtctcagtttacagatgttaaggaacttataatcaaaactgtattaagctcggcaagagatgagccctctggtcctgcacgatgtgtagcactttgtagtttaggtatttggatttgtgaagaactagtccatgagtctcatcatcctcaaattaaggaagctctgaatgtgatttgtgtttccttaaagtttactaataaaacagtagcccacgtagcttgtaacatgcttcacatgctggttcattatgtacctagacttcagatttaccagcctgattctcccttgaaaattattcaaatcctaatagctaccatcacccatcttttaccaagtacagaggcttcatcttatgaaatggacaagaggttggtagtatctttacttctctgccttctggactggatcatggccttacctctaaagacactgctccaaccatttcatgctacgggagcagaaagcgataaaacagaaaaatctgttctcaattgcatttataaggttttacatgggtgtgtttatggagctcagtgttttagcaatccaaggtattttcccatgagcctctctgatttggcatctgtagattatgatccttttatgcatttggaaagtctgaaagagcctgagcctctgcactctcctgactcagaacgatcttctaaactccagccagtaacagaagtgaaaactcaaatgcagcatggattaatctctatagcagcccgcactgttattacacatctggtaaatcacctgggccattatccaatgagcggtggtcctgctatgctaacaagtcaggtgtgtgaaaatcacgacaatcattacagtgaaagtactgaactttctcctgaactctttgagagtccaaatatccagttctttgtgttaaataatacaaccttagtgtcctgtatccagatcagatcagaagagaatatgcctggaggaggtttatctgctggccttgcatcagccaattcaaatgtcagaatcatagtacgtgatctctctggaaaatattcatgggattctgctatactgtatggcccacctcctgtaagtggcttgtcagaacctacatctttcatgctttcattgtctcaccaagagaagccagaagagcctccgacatctaatgaatgcttagaagatataaccgtaaaagatggactttctctccagtttaaaagatttagagaaactgtaccaacttgggatacaataagagatgaagaagatgttcttgatgagctcttgcagtatttgggtgttactagtcctgaatgcttacagagaactggaatctcacttaatattcctgctccacaacctgtgtgcatttctgaaaaacaagaaaatgatgttattaatgctatccttaagcaacatacagaagaaaaagaatttgttgagaagcactttaatgacttaaacatgaaagctgtggaacaagatgaaccaatacctcaaaaacctcagtcagcattttattattgcagattgcttcttagtatattgggaatgaattcctgggacaaacggaggagctttcatctcctgaagaaaaatgaaaagctacttagagaacttaggaacttggattcaaggcagtgccgagagacacacaagattgcagtattttatgttgctgaaggacaagaagacaaacactccattctcaccaatacaggaggaagtcaagcatatgaagattttgtagctggtcttggttgggaggtaaatcttacaaaccattgtggttttatgggaggactacaaaaaaacaaaagcactggattgaccactccatattttgctacctctacagtagaggtaatatttcacgtgtcaacaagaatgccttctgattctgatgattctttgaccaaaaaattgagacatttgggaaatgatgaagtgcacattgtttggtcagagcatactagagactacaggagaggaattattcccacagaatttggtgatgtccttattgtaatatatccaatgaaaaatcacatgttcagtattcagataatgaaaaaaccagaggttcccttctttggtcccctttttgatggtgctattgtgaatggaaaggttctacccattatggttagagcaacagctataaatgcaagccgtgctctgaaatctctgattccattgtatcaaaacttctatgaggagagagcacgatacctgcaaacaattgtccagcaccacttagaaccaacaacatttgaagattttgcagcacaggttttttctccagctccctaccaccatttaccatctgatgccgatcattaaatatcagttctgtttatctgaagggctcctacccagagattctacccagtgaaactcccacagcaacgcaggtagatggggctgacctggcctctccaatgtctcctcgaactagcaaaagccgcatgtccatgaagctgcgtcgttcctctggctcagccaataaatcctaaggagacaagcagcccagcagtgatcagcagtagccaccttagcacgaacatagggttaaccctttcaggccttcatgtctgccataacatgcatgtttcttcctgtacatttatttgagaaaacactggatttaaataattttaaataatttgtagcttaatattaaagatttaagttatttattgtttcattttttttcccacaatccaagctgccatattttgagggcagggggagttttattctacaccctttaccttcctagataattatgtctaagtagttttatctttaatttcatggttaactgtgagccaaaatacaattggacaattagtctcattatttattgtgccccattgcaactttatggttcaataaatatataattttttacaaatgtaaaattttacatttaagcatttgtaaagttacagcaaaagatgtacctgttaatacacagaatgtgtacagattatttgttatgacaataaaacactcaaaataaatggtctttagcatctcaaattccaactgaaatcattttagtattaactcttcttcccaaagcaatgtctcatttcttggctgtgcaggtgatgccatgttatatccaataactagaaaaatcactgtgctgaacttttatgtttagcttccaagtatttttctaatgttttgcatttcaagtggtatcactgttaaatgccatttgttttcagattgtggccttttattattggctgctagatcctggtgtttctatgttcttttttaagcaccaaaaagaagatggggaagaaaagaaggaaaattttctgatataaatatgttgttcaaattatgagtattatttaaaaaagaaaaaggaacataacccaggagtctaagttaaatctaatattgttaatactgaacttgcaggtccaggttggtatacattccaccctctagaagtattttcttacagtagataagctgctcacattttgttttgaatgggcatctcctgaggaaatgtagcatgacattggtactaactgcatgtgtaaatacatcatactggcaaaccgtaaaatataaattatgtatcatcattcatgtagtatctataatttgtaacagtgggggggaaagatgacatggtatttaataatacaataaaaatattcttatcacttccta

SEQ ID NO: 82 - DNA, 8570 bp, Homo sapien
gcgggaaggtgttcgtcttttcttactatggttgcaagctcttcagaataactgtagcaaagaacagctctggatgttttcatgcttaatccctggattttcagcaccacagtctgaacatggacctcgaactttagataatctcattaatcctccactcaaccttcaagaaactcaagtcactatagaagaaatcactcctcttgtccccccacaatcaggagataaagggcaagaagatctcacaagctattttcttgaagcacttctaaaatacatagtcattcaggtaaaaagtttagaatggaagaacaaagaaaaccaagaaaggggattttcatttttgttttcacattttaagaaatattacttgccttatatttttccaaacatctgtaaggaaaacagtttatatcatcctatacttgacatcccgcagatgagaccaaagccacattatgtcgtgataaagaaagatgctgaaaccaatgaagcaatctattgtacaaaggagcctttcattaaggctcgtgttattgtcattcgttggctggtttctttctggctggagccaaaaccacatacaggacctcatattcctgggatggaaggtgaagtcttgccaaagaatattcagagagcagctgctagtttagtatccagagaagaaagcaaaaatgataatgctgataaaacagacagaactacagaacccgaacagtctcattccaatacaagcactctcacggagcgagaacctagctcatctagtctctgtagtattgatgaagaacatctcacagacattgaaatagttcgcagagttttttcttctaaaaggagtaatgtaaactttgtgacagagatatttcgtcaggcatttttattaccaatttgtgaagcagcagctatgagaaaagtggtaaaagtatatcaagaatggatccaacaagaggaaaaacctttgttcatgcaagagcctgaagaaattgtgatcacttcttcagacctcccttgcattgaaaatgtcacagaccatgatatttcaatggaagaaggagaaaaaagagaagaggaaaatgggaccaatactgctgatcatgttcgaaattccagttgggcaaaaaacggctcctaccaaggtgctcttcataacgcctctgaagaagccacagaacaaaacatacgagctggtacccaggcagttttgcaggtgtttattataaactcatcaaatatatttcttcttgaacctgcaaatgaaataaaaaatcttctggatgaacacacagatatgtgtaaacgcattcttaacatttatcggtacatggttgtacaagtatcaatggacaaaaagacttgggaacagatgctgcttgtgttgctcagagtcacggaatctgtactgaagatgccatcacaagcttttctacagttccaagggaaaaaaaatatgaccttggcaggtcgacttgcaggaccacttttccagacccttatagttgcctggatcaaagcaaacctaaatgtgtacatctcccgagaactttgggatgacttactgtcagtattgtcatcgctgacctattgggaagagttggccactgagtggtcactgactatggagacattaactaaagttttagctaggaatttatatagtttggatctcagtgatttaccattggataagctgagtgaacagaaacaaaaaaagcacaaagggaaaggagttggacatgaatttcagaaagtttcagttgacaagtcattttctagaggatggagtcgtgatcagcctggccaagccccaatgagacagaggagtgcaacaaccactggttctccaggaaccgaaaaggcgaggagtatagtacggcaaaaaactgtcgatattgatgatgctcaaatacttccccgctcaactagagtcagacatttttcacaaagtgaagaaactggaaatgaagtttttggtgctttgaatgaggagcagccattgcctcgaagtagcagcacttctgacatcttggaaccattcactgttgaacgagccaaagtcaataaagaggacatgagccaaaaactgcctcctcttaatagtgatattggcggcagcagtgctaatgttcctgatctgatggatgagtttatagcagaacgacttcgaagtggtaatgcctcgactatgacaagaagaggaagtagtccaggcagcctggaaattcccaaagacctccctgatattctaaacaagcagaaccagatgcgccctattgatgacccaggtgtgccctcagaatggacttctcctgccagtgcagggagcagtgatcttatcagctcagatagtcattcggattctttcagcgctttccaatatgatggccgaaaatttgacaattttggctttggaaccgacactggggttacgtcctctgctgatgtggattcaggttctggccatcatcagagtgctgaagagcaggaagtggctagtctaactactcttcatatagattctgaaacaagcagtcttaatcagcaagctttctctgctgaagttgcaactattactggttcagaaagtgcttccccagtccactcacctctgggctccaggtcacagactccttccccttctacattgaatatagatcacatggaacagaaggatctgcagctcgacgagaagctccaccactctgttcttcagacaccagatgatctagaaattagtgaatttccatcagaatgttgtagtgtgatggcaggaggtactctgactggatggcatgctgatgttgctactgtaatgtggcgaagaatgctaggcattttgggagatgtaaattcaatcatggatcctgaaatacatgctcaagtttttgattacctctgtgaactttggcagaatctagctaagattagagataaccttggcatttcaactgataacctgacctccccttctccaccagttttaattcctccactgagaattcttacaccttggctttttaaggcaaccatgttgactgataaatataaacaaggtaaattacatgcatataaacttatttgtaatacaatgaaaagaagacaagatgtttctccaaatagagattttctaacacatttctacaatataatgcattgtggattacttcatattgaccaggatattgtcaatacaatcatcaaacactgctcacctcaatttttttcacttggtttgcctggtgccacaatgcttattatggattttattgtagcagctggtagagtggcttcttcagcttttctcaatgcaccaagagtagaagcacaagttcttctgggatctttggtttgctttcccaacttatattgtgaactgccttctcttcatcccaacattcctgatgttgctgtgtctcagtttacagatgttaaggaacttataatcaaaactgtattaagctcggcaagagatgagccctctggtcctgcacgatgtgtagcactttgtagtttaggtatttggatttgtgaagaactagtccatgagtctcatcatcctcaaattaaggaagctctgaatgtgatttgtgtttccttaaagtttactaataaaacagtagcccacgtagcttgtaacatgcttcacatgctggttcattatgtacctagacttcagatttaccagcctgattctcccttgaaaattattcaaatcctaatagctaccatcacccatcttttaccaagtacagaggcttcatcttatgaaatggacaagaggttggtagtatctttacttctctgccttctggactggatcatggccttacctctaaagacactgctccaaccatttcatgctacgggagcagaaagcgataaaacagaaaaatctgttctcaattgcatttataaggttttacatgggtgtgtttatggagctcagtgttttagcaatccaaggtattttcccatgagcctctctgatttggcatctgtagattatgatccttttatgcatttggaaagtctgaaagagcctgagcctctgcactctcctgactcagaacgatcttctaaactccagccagtaacagaagtgaaaactcaaatgcagcatggattaatctctatagcagcccgcactgttattacacatctggtaaatcacctgggccattatccaatgagcggtggtcctgctatgctaacaagtcaggtgtgtgaaaatcacgacaatcattacagtgaaagtactgaactttctcctgaactctttgagagtccaaatatccagttctttgtgttaaataatacaaccttagtgtcctgtatccagatcagatcagaagagaatatgcctggaggaggtttatctgctggccttgcatcagccaattcaaatgtcagaatcatagtacgtgatctctctggaaaatattcatgggattctgctatactgtatggcccacctcctgtaagtggcttgtcagaacctacatctttcatgctttcattgtctcaccaagagaagccagaagagcctccgacatctaatgaatgcttagaagatataaccgtaaaagatggactttctctccagtttaaaagatttagagaaactgtaccaacttgggatacaataagagatgaagaagatgttcttgatgagctcttgcagtatttgggtgttactagtcctgaatgcttacagagaactggaatctcacttaatattcctgctccacaacctgtgtgcatttctgaaaaacaagaaaatgatgttattaatgctatccttaagcaacatacagaagaaaaagaatttgttgagaagcactttaatgacttaaacatgaaagctgtggaacaagatgaaccaatacctcaaaaacctcagtcagcattttattattgcagattgcttcttagtatattgggaatgaattcctgggacaaacggaggagctttcatctcctgaagaaaaatgaaaagctacttagagaacttaggaacttggattcaaggcagtgccgagagacacacaagattgcagtattttatgttgctgaaggacaagaagacaaacactccattctcaccaatacaggaggaagtcaagcatatgaagattttgtagctggtcttggttgggaggtaaatcttacaaaccattgtggttttatgggaggactacaaaaaaacaaaagcactggattgaccactccatattttgctacctctacagtagaggtaatatttcacgtgtcaacaagaatgccttctgattctgatgattctttgaccaaaaaattgagacatttgggaaatgatgaagtgcacattgtttggtcagagcatactagagactacaggagaggaattattcccacagaatttggtgatgtccttattgtaatatatccaatgaaaaatcacatgttcagtattcagataatgaaaaaaccagaggttcccttctttggtcccctttttgatggtgctattgtgaatggaaaggttctacccattatggttagagcaacagctataaatgcaagccgtgctctgaaatctctgattccattgtatcaaaacttctatgaggagagagcacgatacctgcaaacaattgtccagcaccacttagaaccaacaacatttgaagattttgcagcacaggttttttctccagctccctaccaccatttaccatctgatgccgatcattaaatatcagttctgtttatctgaaggactatcaacataagagaggataaatttccttcaaactaaatttaatggtatgttgtgcttttcacatttgaacaataatattttgtataggtggtcattttcttcaaaaatgttcctcatttctatcccttcgtttctaatcctcatctgttctgattcaaaatgtatcagcttttatttttctctgtttaatagcattattatgtagctatacttactgtgctcctactatgtgccaatatctttgcatatgtaatcttaatccctgggatgacttgacaaaattgcaagtattagctccattttacgaatacaaaaatgtctcaagtcagtttgcccaagatcaaacagctggtaaagtgacagagtcggcatttaatctaggactgtctaacctatgcccatgttctttctaacaaatcacatcgtcgctggagttcagtattaattgaaattgcttttaaagatataatattttatagggctatatctgcccaataattagcagctttaaaccagtcatacctgtcaccaaacagtacaaacgaaaccacaataaaaaatgatcttttgagctccctcttataatccctatatatcccaaaagtcatatccattatgttaattgtaataatagtttattgtaatcaatgtgcaatatatgaatcaatttatcccatcagattacacagtctgtgtgagcactgtaagaatgttagtaacagatacggtatgcacaaacataggagctcatgtgtacttttaaaacctcatccttgaggatatattaataatagaaataaatcagcattctttatgactcaagtagtataaatcaataggtagagtaggatgtgaaatgaaatgtaggttgttactacattttttacatctaaaattgaggtctttctactgtaaattatttatagagtttgggaatgttgaatatataccacaaatgtaatttgctaaattgttaggaagtactgataactatacaccacacacactaaaaatccttatttgactctgttgagtgaagggagatttcactttaaaggcagtgaggaagacatggaagaattgtttttgaggaaaatattatttgagtttgccataatgtagagcaatgctctctgataaagccctccttctatggtgatggaaatgttctatatctgcactgtctaatgtggaagccgctaactacatgtggctgttgaacaattgaaatgtggctagtgtactgaggaactgaatttttatttaattcattttaattcaataaatttaaacttaatgtggctgtggctaccacattggacaatgcagctctagagattttatgtctgagtgattaggataacatgccaacagtacagtgaacactttaaaaggtagatatttacagaatctctcatagaccttttttcttcttttcttttttcctatttgaacttgttttgttagttgggctcctacccagagattctacccagtgaaactcccacagcaacgcaggtagatggggctgacctggcctctccaatgtctcctcgaactagcaaaagccgcatgtccatgaagctgcgtcgttcctctggctcagccaataaatcctaaggagacaagcagcccagcagtgatcagcagtagccaccttagcacgaacatagggttaaccctttcaggccttcatgtctgccataacatgcatgtttcttcctgtacatttatttgagaaaacactggatttaaataattttaaataatttgtagcttaatattaaagatttaagttatttattgtttcattttttttcccacaatccaagctgccatattttgagggcagggggagttttattctacaccctttaccttcctagataattatgtctaagtagttttatctttaatttcatggttaactgtgagccaaaatacaattggacaattagtctcattatttattgtgccccattgcaactttatggttcaataaatatataattttttacaaatgtaaaattttacatttaagcatttgtaaagttacagcaaaagatgtacctgttaatacacagaatgtgtacagattatttgttatgacaataaaacactcaaaataaatggtctttagcatctcaaattccaactgaaatcattttagtattaactcttcttcccaaagcaatgtctcatttcttggctgtgcaggtgatgccatgttatatccaataactagaaaaatcactgtgctgaacttttatgtttagcttccaagtatttttctaatgttttgcatttcaagtggtatcactgttaaatgccatttgttttcagattgtggccttttattattggctgctagatcctggtgtttctatgttcttttttaagcaccaaaaagaagatggggaagaaaagaaggaaaattttctgatataaatatgttgttcaaattatgagtattatttaaaaaagaaaaaggaacataacccaggagtctaagttaaatctaatattgttaatactgaacttgcaggtccaggttggtatacattccaccctctagaagtattttcttacagtagataagctgctcacattttgttttgaatgggcatctcctgaggaaatgtagcatgacattggtactaactgcatgtgtaaatacatcatactggcaaaccgtaaaatataaattatgtatcatcattcatgtagtatctataatttgtaacagtgggggggaaagatgacatggtatttaataatacaataaaaatattcttatcacttccta

SEQ ID NO: 83 - DNA, 7161 bp, Homo sapien
gcgggaaggtgttcgtcttttcttactatggttgcaagctcttcagaataactgtagcaaagaacagctctggatgttttcatgcttaatccctggattttcagcaccacagtctgaacatggacctcgaactttagataatctcattaatcctccactcaaccttcaagaaactcaagtcactatagaagaaatcactcctcttgtccccccacaatcaggagataaagggcaagaagatctcacaagctattttcttgaagcacttctaaaatacatagtcattcaggtaaaaagtttagaatggaagaacaaagaaaaccaagaaaggggattttcatttttgttttcacattttaagaaatattacttgccttatatttttccaaacatctgtaaggaaaacagtttatatcatcctatacttgacatcccgcagatgagaccaaagccacattatgtcgtgataaagaaagatgctgaaaccaatgaagcaatctattgtacaaaggagcctttcattaaggctcgtgttattgtcattcgttggctggtttctttctggctggagccaaaaccacatacaggacctcatattcctgggatggaaggtgaagtcttgccaaagaatattcagagagcagctgctagtttagtatccagagaagaaagcaaaaatgataatgctgataaaacagacagaactacagaacccgaacagtctcattccaatacaagcactctcacggagcgagaacctagctcatctagtctctgtagtattgatgaagaacatctcacagacattgaaatagttcgcagagttttttcttctaaaaggagtaatgtaaactttgtgacagagatatttcgtcaggcatttttattaccaatttgtgaagcagcagctatgagaaaagtggtaaaagtatatcaagaatggatccaacaagaggaaaaacctttgttcatgcaagagcctgaagaaattgtgatcacttcttcagacctcccttgcattgaaaatgtcacagaccatgatatttcaatggaagaaggagaaaaaagagaagaggaaaatgggaccaatactgctgatcatgttcgaaattccagttgggcaaaaaacggctcctaccaaggtgctcttcataacgcctctgaagaagccacagaacaaaacatacgagctggtacccaggcagttttgcaggtgtttattataaactcatcaaatatatttcttcttgaacctgcaaatgaaataaaaaatcttctggatgaacacacagatatgtgtaaacgcattcttaacatttatcggtacatggttgtacaagtatcaatggacaaaaagacttgggaacagatgctgcttgtgttgctcagagtcacggaatctgtactgaagatgccatcacaagcttttctacagttccaagggaaaaaaaatatgaccttggcaggtcgacttgcaggaccacttttccagacccttatagttgcctggatcaaagcaaacctaaatgtgtacatctcccgagaactttgggatgacttactgtcagtattgtcatcgctgacctattgggaagagttggccactgagtggtcactgactatggagacattaactaaagttttagctaggaatttatatagtttggatctcagtgatttaccattggataagctgagtgaacagaaacaaaaaaagcacaaagggaaaggagttggacatgaatttcagaaagtttcagttgacaagtcattttctagaggatggagtcgtgatcagcctggccaagccccaatgagacagaggagtgcaacaaccactggttctccaggaaccgaaaaggcgaggagtatagtacggcaaaaaactgtcgatattgatgatgctcaaatacttccccgctcaactagagtcagacatttttcacaaagtgaagaaactggaaatgaagtttttggtgctttgaatgaggagcagccattgcctcgaagtagcagcacttctgacatcttggaaccattcactgttgaacgagccaaagtcaataaagaggacatgagccaaaaactgcctcctcttaatagtgatattggcggcagcagtgctaatgttcctgatctgatggatgagtttatagcagaacgacttcgaagtggtaatgcctcgactatgacaagaagaggaagtagtccaggcagcctggaaattcccaaagacctccctgatattctaaacaagcagaaccagatgcgccctattgatgacccaggtgtgccctcagaatggacttctcctgccagtgcagggagcagtgatcttatcagctcagatagtcattcggattctttcagcgctttccaatatgatggccgaaaatttgacaattttggctttggaaccgacactggggttacgtcctctgctgatgtggattcaggttctggccatcatcagagtgctgaagagcaggaagtggctagtctaactactcttcatatagattctgaaacaagcagtcttaatcagcaagctttctctgctgaagttgcaactattactggttcagaaagtgcttccccagtccactcacctctgggctccaggtcacagactccttccccttctacattgaatatagatcacatggaacagaaggatctgcagctcgacgagaagctccaccactctgttcttcagacaccagatgatctagaaattagtgaatttccatcagaatgttgtagtgtgatggcaggaggtactctgactggatggcatgctgatgttgctactgtaatgtggcgaagaatgctaggcattttgggagatgtaaattcaatcatggatcctgaaatacatgctcaagtttttgattacctctgtgaactttggcagaatctagctaagattagagataaccttggcatttcaactgataacctgacctccccttctccaccagttttaattcctccactgagaattcttacaccttggctttttaaggcaaccatgttgactgataaatataaacaaggtaaattacatgcatataaacttatttgtaatacaatgaaaagaagacaagatgtttctccaaatagagattttctaacacatttctacaatataatgcattgtggattacttcatattgaccaggatattgtcaatacaatcatcaaacactgctcacctcaatttttttcacttggtttgcctggtgccacaatgcttattatggattttattgtagcagctggtagagtggcttcttcagcttttctcaatgcaccaagagtagaagcacaagttcttctgggatctttggtttgctttcccaacttatattgtgaactgccttctcttcatcccaacattcctgatgttgctgtgtctcagtttacagatgttaaggaacttataatcaaaactgtattaagctcggcaagagatgagccctctggtcctgcacgatgtgtagcactttgtagtttaggtatttggatttgtgaagaactagtccatgagtctcatcatcctcaaattaaggaagctctgaatgtgatttgtgtttccttaaagtttactaataaaacagtagcccacgtagcttgtaacatgcttcacatgctggttcattatgtacctagacttcagatttaccagcctgattctcccttgaaaattattcaaatcctaatagctaccatcacccatcttttaccaagtacagaggcttcatcttatgaaatggacaagaggttggtagtatctttacttctctgccttctggactggatcatggccttacctctaaagacactgctccaaccatttcatgctacgggagcagaaagcgataaaacagaaaaatctgttctcaattgcatttataaggttttacatgggtgtgtttatggagctcagtgttttagcaatccaaggtattttcccatgagcctctctgatttggcatctgtagattatgatccttttatgcatttggaaagtctgaaagagcctgagcctctgcactctcctgactcagaacgatcttctaaactccagccagtaacagaagtgaaaactcaaatgcagcatggattaatctctatagcagcccgcactgttattacacatctggtaaatcacctgggccattatccaatgagcggtggtcctgctatgctaacaagtcaggtgtgtgaaaatcacgacaatcattacagtgaaagtactgaactttctcctgaactctttgagagtccaaatatccagttctttgtgttaaataatacaaccttagtgtcctgtatccagatcagatcagaagagaatatgcctggaggaggtttatctgctggccttgcatcagccaattcaaatgtcagaatcatagtacgtgatctctctggaaaatattcatgggattctgctatactgtatggcccacctcctgtaagtggcttgtcagaacctacatctttcatgctttcattgtctcaccaagagaagccagaagagcctccgacatctaatgaatgcttagaagatataaccgtaaaagatggactttctctccagtttaaaagatttagagaaactgtaccaacttgggatacaataagagatgaagaagatgttcttgatgagctcttgcagtatttgggtgttactagtcctgaatgcttacagagaactggaatctcacttaatattcctgctccacaacctgtgtgcatttctgaaaaacaagaaaatgatgttattaatgctatccttaagcaacatacagaagaaaaagaatttgttgagaagcactttaatgacttaaacatgaaagctgtggaacaagatgaaccaatacctcaaaaacctcagtcagcattttattattgcagattgcttcttagtatattgggaatgaattcctgggacaaacggaggagctttcatctcctgaagaaaaatgaaaagctacttagagaacttaggaacttggattcaaggcagtgccgagagacacacaagattgcagtattttatgttgctgaaggacaagaagacaaacactccattctcaccaatacaggaggaagtcaagcatatgaagattttgtagctggtcttggttgggaggtaaatcttacaaaccattgtggttttatgggaggactacaaaaaaacaaaagcactggattgaccactccatattttgctacctctacagtagaggtaatatttcacgtgtcaacaagaatgccttctgattctgatgattctttgaccaaaaaaatccaagtttatgacacatatgtttttcttctctctgaagaacttgttttaacatttcttgaaagttgagacatttgggaaatgatgaagtgcacattgtttggtcagagcatactagagactacaggagaggaattattcccacagaatttggtgatgtccttattgtaatatatccaatgaaaaatcacatgttcagtattcagataatgaaaaaaccagaggttcccttctttggtcccctttttgatggtgctattgtgaatggaaaggttctacccattatggttagagcaacagctataaatgcaagccgtgctctgaaatctctgattccattgtatcaaaacttctatgaggagagagcacgatacctgcaaacaattgtccagcaccacttagaaccaacaacatttgaagattttgcagcacaggttttttctccagctccctaccaccatttaccatctgatgccgatcattaaatatcagttctgtttatctgaagggctcctacccagagattctacccagtgaaactcccacagcaacgcaggtagatggggctgacctggcctctccaatgtctcctcgaactagcaaaagccgcatgtccatgaagctgcgtcgttcctctggctcagccaataaatcctaaggagacaagcagcccagcagtgatcagcagtagccaccttagcacgaacatagggttaaccctttcaggccttcatgtctgccataacatgcatgtttcttcctgtacatttatttgagaaaacactggatttaaataattttaaataatttgtagcttaatattaaagatttaagttatttattgtttcattttttttcccacaatccaagctgccatattttgagggcagggggagttttattctacaccctttaccttcctagataattatgtctaagtagttttatctttaatttcatggttaactgtgagccaaaatacaattggacaattagtctcattatttattgtgccccattgcaactttatggttcaataaatatataattttttacaaatgtaaaattttacatttaagcatttgtaaagttacagcaaaagatgtacctgttaatacacagaatgtgtacagattatttgttatgacaataaaacactcaaaataaatggtctttagcatctcaaattccaactgaaatcattttagtattaactcttcttcccaaagcaatgtctcatttcttggctgtgcaggtgatgccatgttatatccaataactagaaaaatcactgtgctgaacttttatgtttagcttccaagtatttttctaatgttttgcatttcaagtggtatcactgttaaatgccatttgttttcagattgtggccttttattattggctgctagatcctggtgtttctatgttcttttttaagcaccaaaaagaagatggggaagaaaagaaggaaaattttctgatataaatatgttgttcaaattatgagtattatttaaaaaagaaaaaggaacataacccaggagtctaagttaaatctaatattgttaatactgaacttgcaggtccaggttggtatacattccaccctctagaagtattttcttacagtagataagctgctcacattttgttttgaatgggcatctcctgaggaaatgtagcatgacattggtactaactgcatgtgtaaatacatcatactggcaaaccgtaaaatataaattatgtatcatcattcatgtagtatctataatttgtaacagtgggggggaaagatgacatggtatttaataatacaataaaaatattcttatcacttccta

SEQ ID NO: 84 - DNA, 7144 bp, Homo sapien
gcgggaaggtgttcgtcttttcttactatggttgcaagctcttcagaataactgtagcaaagaacagctctggatgttttcatgcttaatccctggattttcagcaccacagtctgaacatggacctcgaactttagataatctcattaatcctccactcaaccttcaagaaactcaagtcactatagaagaaatcactcctcttgtccccccacaatcaggagataaagggcaagaagatctcacaagctattttcttgaagcacttctaaaatacatagtcattcaggtaaaaagtttagaatggaagaacaaagaaaaccaagaaaggggattttcatttttgttttcacattttaagaaatattacttgccttatatttttccaaacatctgtaaggaaaacagtttatatcatcctatacttgacatcccgcagatgagaccaaagccacattatgtcgtgataaagaaagatgctgaaaccaatgaagcaatctattgtacaaaggagcctttcattaaggctcgtgttattgtcattcgttggctggtttctttctggctggagccaaaaccacatacaggacctcatattcctgggatggaaggtgaagtcttgccaaagaatattcagagagcagctgctagtttagtatccagagaagaaagcaaaaatgataatgctgataaaacagacagaactacagaacccgaacagtctcattccaatacaagcactctcacggagcgagaacctagctcatctagtctctgtagtattgatgaagaacatctcacagacattgaaatagttcgcagagttttttcttctaaaaggagtaatgtaaactttgtgacagagatatttcgtcaggcatttttattaccaatttgtgaagcagcagctatgagaaaagtggtaaaagtatatcaagaatggatccaacaagaggaaaaacctttgttcatgcaagagcctgaagaaattgtgatcacttcttcagacctcccttgcattgaaaatgtcacagaccatgatatttcaatggaagaaggagaaaaaagagaagaggaaaatgggaccaatactgctgatcatgttcgaaattccagttgggcaaaaaacggctcctaccaaggtgctcttcataacgcctctgaagaagccacagaacaaaacatacgagctggtacccaggcagttttgcaggtgtttattataaactcatcaaatatatttcttcttgaacctgcaaatgaaataaaaaatcttctggatgaacacacagatatgtgtaaacgcattcttaacatttatcggtacatggttgtacaagtatcaatggacaaaaagacttgggaacagatgctgcttgtgttgctcagagtcacggaatctgtactgaagatgccatcacaagcttttctacagttccaagggaaaaaaaatatgaccttggcaggtcgacttgcaggaccacttttccagacccttatagttgcctggatcaaagcaaacctaaatgtgtacatctcccgagaactttgggatgacttactgtcagtattgtcatcgctgacctattgggaagagttggccactgagtggtcactgactatggagacattaactaaagttttagctaggaatttatatagtttggatctcagtgatttaccattggataagctgagtgaacagaaacaaaaaaagcacaaagggaaaggagttggacatgaatttcagaaagtttcagttgacaagtcattttctagaggatggagtcgtgatcagcctggccaagccccaatgagacagaggagtgcaacaaccactggttctccaggaaccgaaaaggcgaggagtatagtacggcaaaaaactgtcgatattgatgatgctcaaatacttccccgctcaactagagtcagacatttttcacaaagtgaagaaactggaaatgaagtttttggtgctttgaatgaggagcagccattgcctcgaagtagcagcacttctgacatcttggaaccattcactgttgaacgagccaaagtcaataaagaggacatgagccaaaaactgcctcctcttaatagtgatattggcggcagcagtgctaatgttcctgatctgatggatgagtttatagcagaacgacttcgaagtggtaatgcctcgactatgacaagaagaggaagtagtccaggcagcctggaaattcccaaagacctccctgatattctaaacaagcagaaccagatgcgccctattgatgacccaggtgtgccctcagaatggacttctcctgccagtgcagggagcagtgatcttatcagctcagatagtcattcggattctttcagcgctttccaatatgatggccgaaaatttgacaattttggctttggaaccgacactggggttacgtcctctgctgatgtggattcaggttctggccatcatcagagtgctgaagagcaggaagtggctagtctaactactcttcatatagattctgaaacaagcagtcttaatcagcaagctttctctgctgaagttgcaactattactggttcagaaagtgcttccccagtccactcacctctgggctccaggtcacagactccttccccttctacattgaatatagatcacatggaacagaaggatctgcagctcgacgagaagctccaccactctgttcttcagacaccagatgatctagaaattagtgaatttccatcagaatgttgtagtgtgatggcaggaggtactctgactggatggcatgctgatgttgctactgtaatgtggcgaagaatgctaggcattttgggagatgtaaattcaatcatggatcctgaaatacatgctcaagtttttgattacctctgtgaactttggcagaatctagctaagattagagataaccttggcatttcaactgataacctgacctccccttctccaccagttttaattcctccactgagaattcttacaccttggctttttaaggcaaccatgttgactgataaatataaacaaggtaaattacatgcatataaacttatttgtaatacaatgaaaagaagacaagatgtttctccaaatagagattttctaacacatttctacaatataatgcattgtggattacttcatattgaccaggatattgtcaatacaatcatcaaacactgctcacctcaatttttttcacttggtttgcctggtgccacaatgcttattatggattttattgtagcagctggtagagtggcttcttcagcttttctcaatgcaccaagagtagaagcacaagttcttctgggatctttggtttgctttcccaacttatattgtgaactgccttctcttcatcccaacattcctgatgttgctgtgtctcagtttacagatgttaaggaacttataatcaaaactgtattaagctcggcaagagatgagccctctggtcctgcacgatgtgtagcactttgtagtttaggtatttggatttgtgaagaactagtccatgagtctcatcatcctcaaattaaggaagctctgaatgtgatttgtgtttccttaaagtttactaataaaacagtagcccacgtagcttgtaacatgcttcacatgctggttcattatgtacctagacttcagatttaccagcctgattctcccttgaaaattattcaaatcctaatagctaccatcacccatcttttaccaagtacagaggcttcatcttatgaaatggacaagaggttggtagtatctttacttctctgccttctggactggatcatggccttacctctaaagacactgctccaaccatttcatgctacgggagcagaaagcgataaaacagaaaaatctgttctcaattgcatttataaggttttacatgggtgtgtttatggagctcagtgttttagcaatccaaggtattttcccatgagcctctctgatttggcatctgtagattatgatccttttatgcatttggaaagtctgaaagagcctgagcctctgcactctcctgactcagaacgatcttctaaactccagccagtaacagaagtgaaaactcaaatgcagcatggattaatctctatagcagcccgcactgttattacacatctggtaaatcacctgggccattatccaatgagcggtggtcctgctatgctaacaagtcaggtgtgtgaaaatcacgacaatcattacagtgaaagtactgaactttctcctgaactctttgagagtccaaatatccagttctttgtgttaaataatacaaccttagtgtcctgtatccagatcagatcagaagagaatatgcctggaggaggtttatctgctggccttgcatcagccaattcaaatgtcagaatcatagtacgtgatctctctggaaaatattcatgggattctgctatactgtatggcccacctcctgtaagtggcttgtcagaacctacatctttcatgctttcattgtctcaccaagagaagccagaagagcctccgacatctaatgaatgcttagaagatataaccgtaaaagatggactttctctccagtttaaaagatttagagaaactgtaccaacttgggatacaataagagatgaagaagatgttcttgatgagctcttgcagtatttgggtgttactagtcctgaatgcttacagagaactggaatctcacttaatattcctgctccacaacctgtgtgcatttctgaaaaacaagaaaatgatgttattaatgctatccttaagcaacatacagaagaaaaagaatttgttgagaagcactttaatgacttaaacatgaaagctgtggaacaagatgaaccaatacctcaaaaacctcagtcagcattttattattgcagattgcttcttagtatattgggaatgaattcctgggacaaacggaggagctttcatctcctgaagaaaaatgaaaagctacttagagaacttaggaacttggattcaaggcagtgccgagagacacacaagattgcagtattttatgttgctgaaggacaagaagacaaacactccattctcaccaatacaggaggaagtcaagcatatgaagattttgtagctggtcttggttgggaggtaaatcttacaaaccattgtggttttatgggaggactacaaaaaaacaaaagcactggattgaccactccatattttgctacctctacagtagaggtaatatttcacgtgtcaacaagaatgccttctgattctgatgattctttgaccaaaaaattgagacatttgggaaatgatgaagtgcacattgtttggtcagagcatactagagactacaggagaggaattattcccacagaatttggtgatgtccttattgtaatatatccaatgaaaaatcacatgttcagtattcagataatgaaaaaaccagaggttcccttctttggtcccctttttgatggtgctattgtgaatggaaaggttctacccattatggttagagcaacagctataaatgcaagccgtgctctgaaatctctgattccattgtatcaaaacttctatgaggagagagcacgatacctgcaaacaattgtccagcaccacttagaaccaacaacatttgaagattttgcagcacaggttttttctccagctccctaccaccatttaccatctgatgccgatcattaaatatcagttctgtttatctgaaggactatcaacataagagaggataaatttccttcaaactaaatttaatgggctcctacccagagattctacccagtgaaactcccacagcaacgcaggtagatggggctgacctggcctctccaatgtctcctcgaactagcaaaagccgcatgtccatgaagctgcgtcgttcctctggctcagccaataaatcctaaggagacaagcagcccagcagtgatcagcagtagccaccttagcacgaacatagggttaaccctttcaggccttcatgtctgccataacatgcatgtttcttcctgtacatttatttgagaaaacactggatttaaataattttaaataatttgtagcttaatattaaagatttaagttatttattgtttcattttttttcccacaatccaagctgccatattttgagggcagggggagttttattctacaccctttaccttcctagataattatgtctaagtagttttatctttaatttcatggttaactgtgagccaaaatacaattggacaattagtctcattatttattgtgccccattgcaactttatggttcaataaatatataattttttacaaatgtaaaattttacatttaagcatttgtaaagttacagcaaaagatgtacctgttaatacacagaatgtgtacagattatttgttatgacaataaaacactcaaaataaatggtctttagcatctcaaattccaactgaaatcattttagtattaactcttcttcccaaagcaatgtctcatttcttggctgtgcaggtgatgccatgttatatccaataactagaaaaatcactgtgctgaacttttatgtttagcttccaagtatttttctaatgttttgcatttcaagtggtatcactgttaaatgccatttgttttcagattgtggccttttattattggctgctagatcctggtgtttctatgttcttttttaagcaccaaaaagaagatggggaagaaaagaaggaaaattttctgatataaatatgttgttcaaattatgagtattatttaaaaaagaaaaaggaacataacccaggagtctaagttaaatctaatattgttaatactgaacttgcaggtccaggttggtatacattccaccctctagaagtattttcttacagtagataagctgctcacattttgttttgaatgggcatctcctgaggaaatgtagcatgacattggtactaactgcatgtgtaaatacatcatactggcaaaccgtaaaatataaattatgtatcatcattcatgtagtatctataatttgtaacagtgggggggaaagatgacatggtatttaataatacaataaaaatattcttatcacttccta

SEQ ID NO: 85 - DNA, 1921 bp, Homo sapien
tttgtgtttcatatgtaaaactgatcaagtgcaatttaacaattttttaatttcgtttttcccctttttatgttgtatgtgactgtatgactgtactcaaagagcttttaaagcagtataaattgttttcttgtctttccagttgagacatttgggaaatgatgaagtgcacattgtttggtcagagcatactagagactacaggagaggaattattcccacagaatttggtgatgtccttattgtaatatatccaatgaaaaatcacatgttcagtattcagataatgaaaaaaccagaggttcccttctttggtcccctttttgatggtgctattgtgaatggaaaggttctacccattatggttagagcaacagctataaatgcaagccgtgctctgaaatctctgattccattgtatcaaaacttctatgaggagagagcacgatacctgcaaacaattgtccagcaccacttagaaccaacaacatttgaagattttgcagcacaggttttttctccagctccctaccaccatttaccatctgatgccgatcattaaatatcagttctgtttatctgaagggctcctacccagagattctacccagtgaaactcccacagcaacgcaggtagatggggctgacctggcctctccaatgtctcctcgaactagcaaaagccgcatgtccatgaagctgcgtcgttcctctggctcagccaataaatcctaaggagacaagcagcccagcagtgatcagcagtagccaccttagcacgaacatagggttaaccctttcaggccttcatgtctgccataacatgcatgtttcttcctgtacatttatttgagaaaacactggatttaaataattttaaataatttgtagcttaatattaaagatttaagttatttattgtttcattttttttcccacaatccaagctgccatattttgagggcagggggagttttattctacaccctttaccttcctagataattatgtctaagtagttttatctttaatttcatggttaactgtgagccaaaatacaattggacaattagtctcattatttattgtgccccattgcaactttatggttcaataaatatataattttttacaaatgtaaaattttacatttaagcatttgtaaagttacagcaaaagatgtacctgttaatacacagaatgtgtacagattatttgttatgacaataaaacactcaaaataaatggtctttagcatctcaaattccaactgaaatcattttagtattaactcttcttcccaaagcaatgtctcatttcttggctgtgcaggtgatgccatgttatatccaataactagaaaaatcactgtgctgaacttttatgtttagcttccaagtatttttctaatgttttgcatttcaagtggtatcactgttaaatgccatttgttttcagattgtggccttttattattggctgctagatcctggtgtttctatgttcttttttaagcaccaaaaagaagatggggaagaaaagaaggaaaattttctgatataaatatgttgttcaaattatgagtattatttaaaaaagaaaaaggaacataacccaggagtctaagttaaatctaatattgttaatactgaacttgcaggtccaggttggtatacattccaccctctagaagtattttcttacagtagataagctgctcacattttgttttgaatgggcatctcctgaggaaatgtagcatgacattggtactaactgcatgtgtaaatacatcatactggcaaaccgtaaaatataaattatgtatcatcattcatgtagtatctataatttgtaacagtgggggggaaagatgacatggtatttaataatacaataaaaatattcttatcacttccta

SEQ ID NO: 86 - DNA, 2904 bp, Homo sapien
gctaatcttaataacttatcaactcctttaaaaatattaaaagcaaggttatttgggtagcctttaacctttaatataaggttatattttataggactatcaacataagagaggataaatttccttcaaactaaatttaatggtatgttgtgcttttcacatttgaacaataatattttgtataggtggtcattttcttcaaaaatgttcctcatttctatcccttcgtttctaatcctcatctgttctgattcaaaatgtatcagcttttatttttctctgtttaatagcattattatgtagctatacttactgtgctcctactatgtgccaatatctttgcatatgtaatcttaatccctgggatgacttgacaaaattgcaagtattagctccattttacgaatacaaaaatgtctcaagtcagtttgcccaagatcaaacagctggtaaagtgacagagtcggcatttaatctaggactgtctaacctatgcccatgttctttctaacaaatcacatcgtcgctggagttcagtattaattgaaattgcttttaaagatataatattttatagggctatatctgcccaataattagcagctttaaaccagtcatacctgtcaccaaacagtacaaacgaaaccacaataaaaaatgatcttttgagctccctcttataatccctatatatcccaaaagtcatatccattatgttaattgtaataatagtttattgtaatcaatgtgcaatatatgaatcaatttatcccatcagattacacagtctgtgtgagcactgtaagaatgttagtaacagatacggtatgcacaaacataggagctcatgtgtacttttaaaacctcatccttgaggatatattaataatagaaataaatcagcattctttatgactcaagtagtataaatcaataggtagagtaggatgtgaaatgaaatgtaggttgttactacattttttacatctaaaattgaggtctttctactgtaaattatttatagagtttgggaatgttgaatatataccacaaatgtaatttgctaaattgttaggaagtactgataactatacaccacacacactaaaaatccttatttgactctgttgagtgaagggagatttcactttaaaggcagtgaggaagacatggaagaattgtttttgaggaaaatattatttgagtttgccataatgtagagcaatgctctctgataaagccctccttctatggtgatggaaatgttctatatctgcactgtctaatgtggaagccgctaactacatgtggctgttgaacaattgaaatgtggctagtgtactgaggaactgaatttttatttaattcattttaattcaataaatttaaacttaatgtggctgtggctaccacattggacaatgcagctctagagattttatgtctgagtgattaggataacatgccaacagtacagtgaacactttaaaaggtagatatttacagaatctctcatagaccttttttcttcttttcttttttcctatttgaacttgttttgttagttgggctcctacccagagattctacccagtgaaactcccacagcaacgcaggtagatggggctgacctggcctctccaatgtctcctcgaactagcaaaagccgcatgtccatgaagctgcgtcgttcctctggctcagccaataaatcctaaggagacaagcagcccagcagtgatcagcagtagccaccttagcacgaacatagggttaaccctttcaggccttcatgtctgccataacatgcatgtttcttcctgtacatttatttgagaaaacactggatttaaataattttaaataatttgtagcttaatattaaagatttaagttatttattgtttcattttttttcccacaatccaagctgccatattttgagggcagggggagttttattctacaccctttaccttcctagataattatgtctaagtagttttatctttaatttcatggttaactgtgagccaaaatacaattggacaattagtctcattatttattgtgccccattgcaactttatggttcaataaatatataattttttacaaatgtaaaattttacatttaagcatttgtaaagttacagcaaaagatgtacctgttaatacacagaatgtgtacagattatttgttatgacaataaaacactcaaaataaatggtctttagcatctcaaattccaactgaaatcattttagtattaactcttcttcccaaagcaatgtctcatttcttggctgtgcaggtgatgccatgttatatccaataactagaaaaatcactgtgctgaacttttatgtttagcttccaagtatttttctaatgttttgcatttcaagtggtatcactgttaaatgccatttgttttcagattgtggccttttattattggctgctagatcctggtgtttctatgttcttttttaagcaccaaaaagaagatggggaagaaaagaaggaaaattttctgatataaatatgttgttcaaattatgagtattatttaaaaaagaaaaaggaacataacccaggagtctaagttaaatctaatattgttaatactgaacttgcaggtccaggttggtatacattccaccctctagaagtattttcttacagtagataagctgctcacattttgttttgaatgggcatctcctgaggaaatgtagcatgacattggtactaactgcatgtgtaaatacatcatactggcaaaccgtaaaatataaattatgtatcatcattcatgtagtatctataatttgtaacagtgggggggaaagatgacatggtatttaataatacaataaaaatattcttatcacttccta

SEQ ID NO: 87 - DNA, 8200 bp, Homo sapien
gcgggaaggtgttcgtcttttcttactatggttgcaagctcttcagaataactgtagcaaagaacagctctggatgttttcatgcttaatccctggattttcagcaccacagtctgaacatggacctcgaactttagataatctcattaatcctccactcaaccttcaagaaactcaagtcactatagaagaaatcactcctcttgtccccccacaatcaggagataaagggcaagaagatctcacaagctattttcttgaagcacttctaaaatacatagtcattcaggtaaaaagtttagaatggaagaacaaagaaaaccaagaaaggggattttcatttttgttttcacattttaagaaatattacttgccttatatttttccaaacatctgtaaggaaaacagtttatatcatcctatacttgacatcccgcagatgagaccaaagccacattatgtcgtgataaagaaagatgctgaaaccaatgaagcaatctattgtacaaaggagcctttcattaaggctcgtgttattgtcattcgttggctggtttctttctggctggagccaaaaccacatacaggacctcatattcctgggatggaaggtgaagtcttgccaaagaatattcagagagcagctgctagtttagtatccagagaagaaagcaaaaatgataatgctgataaaacagacagaactacagaacccgaacagtctcattccaatacaagcactctcacggagcgagaacctagctcatctagtctctgtagtattgatgaagaacatctcacagacattgaaatagttcgcagagttttttcttctaaaaggagtaatgtaaactttgtgacagagatatttcgtcaggcatttttattaccaatttgtgaagcagcagctatgagaaaagtggtaaaagtatatcaagaatggatccaacaagaggaaaaacctttgttcatgcaagagcctgaagaaattgtgatcacttcttcagacctcccttgcattgaaaatgtcacagaccatgatatttcaatggaagaaggagaaaaaagagaagaggaaaatgggaccaatactgctgatcatgttcgaaattccagttgggcaaaaaacggctcctaccaaggtgctcttcataacgcctctgaagaagccacagaacaaaacatacgagctggtacccaggcagttttgcaggtgtttattataaactcatcaaatatatttcttcttgaacctgcaaatgaaataaaaaatcttctggatgaacacacagatatgtgtaaacgcattcttaacatttatcggtacatggttgtacaagtatcaatggacaaaaagacttgggaacagatgctgcttgtgttgctcagagtcacggaatctgtactgaagatgccatcacaagcttttctacagttccaagggaaaaaaaatatgaccttggcaggtcgacttgcaggaccacttttccagacccttatagttgcctggatcaaagcaaacctaaatgtgtacatctcccgagaactttgggatgacttactgtcagtattgtcatcgctgacctattgggaagagttggccactgagtggtcactgactatggagacattaactaaagttttagctaggaatttatatagtttggatctcagtgatttaccattggataagctgagtgaacagaaacaaaaaaagcacaaagggaaaggagttggacatgaatttcagaaagtttcagttgacaagtcattttctagaggatggagtcgtgatcagcctggccaagccccaatgagacagaggagtgcaacaaccactggttctccaggaaccgaaaaggcgaggagtatagtacggcaaaaaactgtcgatattgatgatgctcaaatacttccccgctcaactagagtcagacatttttcacaaagtgaagaaactggaaatgaagtttttggtgctttgaatgaggagcagccattgcctcgaagtagcagcacttctgacatcttggaaccattcactgttgaacgagccaaagtcaataaagaggacatgagccaaaaactgcctcctcttaatagtgatattggcggcagcagtgctaatgttcctgatctgatggatgagtttatagcagaacgacttcgaagtggtaatgcctcgactatgacaagaagaggaagtagtccaggcagcctggaaattcccaaagacctccctgatattctaaacaagcagaaccagatgcgccctattgatgacccaggtgtgccctcagaatggacttctcctgccagtgcagggagcagtgatcttatcagctcagatagtcattcggattctttcagcgctttccaatatgatggccgaaaatttgacaattttggctttggaaccgacactggggttacgtcctctgctgatgtggattcaggttctggccatcatcagagtgctgaagagcaggaagtggctagtctaactactcttcatatagattctgaaacaagcagtcttaatcagcaagctttctctgctgaagttgcaactattactggttcagaaagtgcttccccagtccactcacctctgggctccaggtcacagactccttccccttctacattgaatatagatcacatggaacagaaggatctgcagctcgacgagaagctccaccactctgttcttcagacaccagatgatctagaaattagtgaatttccatcagaatgttgtagtgtgatggcaggaggtactctgactggatggcatgctgatgttgctactgtaatgtggcgaagaatgctaggcattttgggagatgtaaattcaatcatggatcctgaaatacatgctcaagtttttgattacctctgtgaactttggcagaatctagctaagattagagataaccttggcatttcaactgataacctgacctccccttctccaccagttttaattcctccactgagaattcttacaccttggctttttaaggcaaccatgttgactgataaatataaacaaggtaaattacatgcatataaacttatttgtaatacaatgaaaagaagacaagatgtttctccaaatagagattttctaacacatttctacaatataatgcattgtggattacttcatattgaccaggatattgtcaatacaatcatcaaacactgctcacctcaatttttttcacttggtttgcctggtgccacaatgcttattatggattttattgtagcagctggtagagtggcttcttcagcttttctcaatgcaccaagagtagaagcacaagttcttctgggatctttggtttgctttcccaacttatattgtgaactgccttctcttcatcccaacattcctgatgttgctgtgtctcagtttacagatgttaaggaacttataatcaaaactgtattaagctcggcaagagatgagccctctggtcctgcacgatgtgtagcactttgtagtttaggtatttggatttgtgaagaactagtccatgagtctcatcatcctcaaattaaggaagctctgaatgtgatttgtgtttccttaaagtttactaataaaacagtagcccacgtagcttgtaacatgcttcacatgctggttcattatgtacctagacttcagatttaccagcctgattctcccttgaaaattattcaaatcctaatagctaccatcacccatcttttaccaagtacagaggcttcatcttatgaaatggacaagaggttggtagtatctttacttctctgccttctggactggatcatggccttacctctaaagacactgctccaaccatttcatgctacgggagcagaaagcgataaaacagaaaaatctgttctcaattgcatttataaggttttacatgggtgtgtttatggagctcagtgttttagcaatccaaggtattttcccatgagcctctctgatttggcatctgtagattatgatccttttatgcatttggaaagtctgaaagagcctgagcctctgcactctcctgactcagaacgatcttctaaactccagccagtaacagaagtgaaaactcaaatgcagcatggattaatctctatagcagcccgcactgttattacacatctggtaaatcacctgggccattatccaatgagcggtggtcctgctatgctaacaagtcaggtgtgtgaaaatcacgacaatcattacagtgaaagtactgaactttctcctgaactctttgagagtccaaatatccagttctttgtgttaaataatacaaccttagtgtcctgtatccagatcagatcagaagagaatatgcctggaggaggtttatctgctggccttgcatcagccaattcaaatgtcagaatcatagtacgtgatctctctggaaaatattcatgggattctgctatactgtatggcccacctcctgtaagtggcttgtcagaacctacatctttcatgctttcattgtctcaccaagagaagccagaagagcctccgacatctaatgaatgcttagaagatataaccgtaaaagatggactttctctccagtttaaaagatttagagaaactgtaccaacttgggatacaataagagatgaagaagatgttcttgatgagctcttgcagtatttgggtgttactagtcctgaatgcttacagagaactggaatctcacttaatattcctgctccacaacctgtgtgcatttctgaaaaacaagaaaatgatgttattaatgctatccttaagcaacatacagaagaaaaagaatttgttgagaagcactttaatgacttaaacatgaaagctgtggaacaagatgaaccaatacctcaaaaacctcagtcagcattttattattgcagattgcttcttagtatattgggaatgaattcctgggacaaacggaggagctttcatctcctgaagaaaaatgaaaagctacttagagaacttaggaacttggattcaaggcagtgccgagagacacacaagattgcagtattttatgttgctgaaggacaagaagacaaacactccattctcaccaatacaggaggaagtcaagcatatgaagattttgtagctggtcttggttgggaggtaaatcttacaaaccattgtggttttatgggaggactacaaaaaaacaaaagcactggattgaccactccatattttgctacctctacagtagaggtaatatttcacgtgtcaacaagaatgccttctgattctgatgattctttgaccaaaaaattgagacatttgggaaatgatgaagtgcacattgtttggtcagagcatactagagactacaggagaggaattattcccacagaatttggtgatgtccttattgtaatatatccaatgaaaaatcacatgttcagtattcagataatgaaaaaaccagaggttcccttctttggtcccctttttgatggtgctattgtgaatggaaaggttctacccattatggttagagcaacagctataaatgcaagccgtgctctgaaatctctgattccattgtatcaaaacttctatgaggagagagcacgatacctgcaaacaattgtccagcaccacttagaaccaacaacatttgaagattttgcagcacaggttttttctccagctccctaccaccatttaccatctgatgccgatcattaaatatcagttctgtttatctgaaggactatcaacataagagaggataaatttccttcaaactaaatttaatggtatgttgtgcttttcacatttgaacaataatattttgtataggtggtcattttcttcaaaaatgttcctcatttctatcccttcgtttctaatcctcatctgttctgattcaaaatgtatcagcttttatttttctctgtttaatagcattattatgtagctatacttactgtgctcctactatgtgccaatatctttgcatatgtaatcttaatccctgggatgacttgacaaaattgcaagtattagctccattttacgaatacaaaaatgtctcaagtcagtttgcccaagatcaaacagctggtaaagtgacagagtcggcatttaatctaggactgtctaacctatgcccatgttctttctaacaaatcacatcgtcgctggagttcagtattaattgaaattgcttttaaagatataatattttatagggctatatctgcccaataattagcagctttaaaccagtcatacctgtcaccaaacagtacaaacgaaaccacaataaaaaatgatcttttgagctccctcttataatccctatatatcccaaaagtcatatccattatgttaattgtaataatagtttattgtaatcaatgtgcaatatatgaatcaatttatcccatcagattacacagtctgtgtgagcactgtaagaatgttagtaacagatacggtatgcacaaacataggagctcatgtgtacttttaaaacctcatccttgaggatatattaataatagaaataaatcagcattctttatgactcaagtagtataaatcaataggtagagtaggatgtgaaatgaaatgtaggttgttactacattttttacatctaaaattgaggtctttctactgtaaattatttatagagtttgggaatgttgaatatataccacaaatgtaatttgctaaattgttaggaagtactgataactatacaccacacacactaaaaatccttatttgactctgttgagtgaagggagatttcactttaaaggcagtgaggaagacatggaagaattgtttttgaggaaaatattatttgagtttgccataatgtagagcaatgctctctgataaagccctccttctatggtgatggaaatgttctatatctgcactgtctaatgtggaagccgctaactacatgtggctgttgaacaattgaaatgtggctagtgtactgaggaactgaatttttatttaattcattttaattcaataaatttaaacttaatgtggctgtggctaccacattggacaatgcagctctagagattttatgtctgagtgattaggataacatgccaacagtacagtgaacactttaaaaggtagatatttacagaatctctcatagaccttttttcttcttttcttttttcctatttgaacttgttttgttagttggtaagtataacatttgaatttacaaagcattgtcattgtgaaccatcaccctaatgcattgcatgcccaattatatttcataataaaaaccttgattcctctctctctgctcctcagttaacacctagaaaattctgcactgtgtctctcatatctgttatctatcttctcttttgctttctcacttctgcttgctactccatttcttcattcacaacaaagaaagaaatgcagtgatagttctcttcctcccaaaacctccgctagaaaacattggccatctcaaggtaaacagcaatgggagggcctctcgtgatggccgggaatgatatgcattaccagaaaagcatgagctactactgctcttcactttccttctgccatccatctgcagtgcttccctaaagggggtcatggattcatattctcccataaattttccagtatgggtctgctatgaaccaattcagatcttcaggaagagtaaaggtgaacagaaatatgtttccttctccttgtattttgaaggccagtcttatttcaattagaaaataatgctggaaaagttactttgagaagaagggcaattgacctggattatgagtgacagaatatttttccttggaaacatatattttttcttaagtataactctaacatttggtcttaaaaactttttgaaggccgggtgcggtggctcacgcctgcaatcccagcactttgggaggcccaggagggtggatcatgagatcaggagattgagaccatcctggccaacatggtgaaactccatctctactaaaatacaaaaaaattagccgggcgtggtggtgcgcacctgtggtcccagctactcaagaggctgaggcaggggaatcgcttgaacccgggcagtggagattgcagtgagccaagatcgtgccactgcactccagcctggcgacagagtgagactccgtctcaaaa

SEQ ID NO: 88 - DNA, 5186 bp, Homo sapien
gcgggaaggtgttcgtcttttcttactatggttgcaagctcttcagaataactgtagcaaagaacagctctggatgttttcatgcttaatccctggattttcagcaccacagtctgaacatggacctcgaactttagataatctcattaatcctccactcaaccttcaagaaactcaagtcactatagaagaaatcactcctcttgtccccccacaatcaggagataaagggcaagaagatctcacaagctattttcttgaagcacttctaaaatacatagtcattcaggtaaaaagtttagaatggaagaacaaagaaaaccaagaaaggggattttcatttttgttttcacattttaagaaatattacttgccttatatttttccaaacatctgtaaggaaaacagtttatatcatcctatacttgacatcccgcagatgagaccaaagccacattatgtcgtgataaagaaagatgctgaaaccaatgaagcaatctattgtacaaaggagcctttcattaaggctcgtgttattgtcattcgttggctggtttctttctggctggagccaaaaccacatacaggacctcatattcctgggatggaaggtgaagtcttgccaaagaatattcagagagcagctgctagtttagtatccagagaagaaagcaaaaatgataatgctgataaaacagacagaactacagaacccgaacagtctcattccaatacaagcactctcacggagcgagaacctagctcatctagtctctgtagtattgatgaagaacatctcacagacattgaaatagttcgcagagttttttcttctaaaaggagtaatgtaaactttgtgacagagatatttcgtcaggcatttttattaccaatttgtgaagcagcagctatgagaaaagtggtaaaagtatatcaagaatggatccaacaagaggaaaaacctttgttcatgcaagagcctgaagaaattgtgatcacttcttcagacctcccttgcattgaaaatgtcacagaccatgatatttcaatggaagaaggagaaaaaagagaagaggaaaatgggaccaatactgctgatcatgttcgaaattccagttgggcaaaaaacggctcctaccaaggtgctcttcataacgcctctgaagaagccacagaacaaaacatacgagctggtacccaggcagttttgcaggtgtttattataaactcatcaaatatatttcttcttgaacctgcaaatgaaataaaaaatcttctggatgaacacacagatatgtgtaaacgcattcttaacatttatcggtacatggttgtacaagtatcaatggacaaaaagacttgggaacagatgctgcttgtgttgctcagagtcacggaatctgtactgaagatgccatcacaagcttttctacagttccaagggaaaaaaaatatgaccttggcaggtcgacttgcaggaccacttttccagacccttatagttgcctggatcaaagcaaacctaaatgtgtacatctcccgagaactttgggatgacttactgtcagtattgtcatcgctgacctattgggaagagttggccactgagtggtcactgactatggagacattaactaaagttttagctaggaatttatatagtttggatctcagtgatttaccattggataagctgagtgaacagaaacaaaaaaagcacaaagggaaaggagttggacatgaatttcagaaagtttcagttgacaagtcattttctagaggatggagtcgtgatcagcctggccaagccccaatgagacagaggagtgcaacaaccactggttctccaggaaccgaaaaggcgaggagtatagtacggcaaaaaactgtcgatattgatgatgctcaaatacttccccgctcaactagagtcagacatttttcacaaagtgaagaaactggaaatgaagtttttggtgctttgaatgaggagcagccattgcctcgaagtagcagcacttctgacatcttggaaccattcactgttgaacgagccaaagtcaataaagaggacatgagccaaaaactgcctcctcttaatagtgatattggcggcagcagtgctaatgttcctgatctgatggatgagtttatagcagaacgacttcgaagtggtaatgcctcgactatgacaagaagaggaagtagtccaggcagcctggaaattcccaaagacctccctgatattctaaacaagcagaaccagatgcgccctattgatgacccaggtgtgccctcagaatggacttctcctgccagtgcagggagcagtgatcttatcagctcagatagtcattcggattctttcagcgctttccaatatgatggccgaaaatttgacaattttggctttggaaccgacactggggttacgtcctctgctgatgtggattcaggttctggccatcatcagagtgctgaagagcaggaagtggctagtctaactactcttcatatagattctgaaacaagcagtcttaatcagcaagctttctctgctgaagttgcaactattactggttcagaaagtgcttccccagtccactcacctctgggctccaggtcacagactccttccccttctacattgaatatagatcacatggaacagaaggatctgcagctcgacgagaagctccaccactctgttcttcagacaccagatgatctagaaattagtgaatttccatcagaatgttgtagtgtgatggcaggaggtactctgactggatggcatgctgatgttgctactgtaatgtggcgaagaatgctaggcattttgggagatgtaaattcaatcatggatcctgaaatacatgctcaagtttttgattacctctgtgaactttggcagaatctagctaagattagagataaccttggcatttcaactgataacctgacctccccttctccaccagttttaattcctccactgagaattcttacaccttggctttttaaggcaaccatgttgactgataaatataaacaaggtaaattacatgcatataaacttatttgtaatacaatgaaaagaagacaagatgtttctccaaatagagattttctaacacatttctacaatataatgcattgtggattacttcatattgaccaggatattgtcaatacaatcatcaaacactgctcacctcaatttttttcacttggtttgcctggtgccacaatgcttattatggattttattgtagcagctggtagagtggcttcttcagcttttctcaatgcaccaagagtagaagcacaagttcttctgggatctttggtttgctttcccaacttatattgtgaactgccttctcttcatcccaacattcctgatgttgctgtgtctcagtttacagatgttaaggaacttataatcaaaactgtattaagctcggcaagagatgagccctctggtcctgcacgatgtgtagcactttgtagtttaggtatttggatttgtgaagaactagtccatgagtctcatcatcctcaaattaaggaagctctgaatgtgatttgtgtttccttaaagtttactaataaaacagtagcccacgtagcttgtaacatgcttcacatgctggttcattatgtacctagacttcagatttaccagcctgattctcccttgaaaattattcaaatcctaatagctaccatcacccatcttttaccaagtacagaggcttcatcttatgaaatggacaagaggttggtagtatctttacttctctgccttctggactggatcatggccttacctctaaagacactgctccaaccatttcatgctacgggagcagaaagcgataaaacagaaaaatctgttctcaattgcatttataaggttttacatgggtgtgtttatggagctcagtgttttagcaatccaaggtattttcccatgagcctctctgatttggcatctgtagattatgatccttttatgcatttggaaagtctgaaagagcctgagcctctgcactctcctgactcagaacgatcttctaaactccagccagtaacagaagtgaaaactcaaatgcagcatggattaatctctatagcagcccgcactgttattacacatctggtaaatcacctgggccattatccaatgagcggtggtcctgctatgctaacaagtcaggtgtgtgaaaatcacgacaatcattacagtgaaagtactgaactttctcctgaactctttgagagtccaaatatccagttctttgtgttaaataatacaaccttagtgtcctgtatccagatcagatcagaagagaatatgcctggaggaggtttatctgctggccttgcatcagccaattcaaatgtcagaatcatagtacgtgatctctctggaaaatattcatgggattctgctatactgtatggcccacctcctgtaagtggcttgtcagaacctacatctttcatgctttcattgtctcaccaagagaagccagaagagcctccgacatctaatgaatgcttagaagatataaccgtaaaagatggactttctctccagtttaaaagatttagagaaactgtaccaacttgggatacaataagagatgaagaagatgttcttgatgagctcttgcagtatttgggtgttactagtcctgaatgcttacagagaactggaatctcacttaatattcctgctccacaacctgtgtgcatttctgaaaaacaagaaaatgatgttattaatgctatccttaagcaacatacagaagaaaaagaatttgttgagaagcactttaatgacttaaacatgaaagctgtggaacaagatgaaccaatacctcaaaaacctcagtcagcattttattattgcagattgcttcttagtatattgggaatgaattcctgggacaaacggaggagctttcatctcctgaagaaaaatgaaaagctacttagagaacttaggaacttggattcaaggcagtgccgagagacacacaagattgcagtattttatgttgctgaaggacaagaagacaaacactccattctcaccaatacaggaggaagtcaagcatatgaagattttgtagctggtcttggttgggagcttattatttttaaattatacgaaa

SEQ ID NO: 89 - DNA, 3818 bp, Homo sapien
gcgggaaggtgttcgtcttttcttactatggttgcaagctcttcagaataactgtagcaaagaacagctctggatgttttcatgcttaatccctggattttcagcaccacagtctgaacatggacctcgaactttagataatctcattaatcctccactcaaccttcaagaaactcaagtcactatagaagaaatcactcctcttgtccccccacaatcaggagataaagggcaagaagatctcacaagctattttcttgaagcacttctaaaatacatagtcattcaggtaaaaagtttagaatggaagaacaaagaaaaccaagaaaggggattttcatttttgttttcacattttaagaaatattacttgccttatatttttccaaacatctgtaaggaaaacagtttatatcatcctatacttgacatcccgcagatgagaccaaagccacattatgtcgtgataaagaaagatgctgaaaccaatgaagcaatctattgtacaaaggagcctttcattaaggctcgtgttattgtcattcgttggctggtttctttctggctggagccaaaaccacatacaggacctcatattcctgggatggaaggtgaagtcttgccaaagaatattcagagagcagctgctagtttagtatccagagaagaaagcaaaaatgataatgctgataaaacagacagaactacagaacccgaacagtctcattccaatacaagcactctcacggagcgagaacctagctcatctagtctctgtagtattgatgaagaacatctcacagacattgaaatagttcgcagagttttttcttctaaaaggagtaatgtaaactttgtgacagagatatttcgtcaggcatttttattaccaatttgtgaagcagcagctatgagaaaagtggtaaaagtatatcaagaatggatccaacaagaggaaaaacctttgttcatgcaagagcctgaagaaattgtgatcacttcttcagacctcccttgcattgaaaatgtcacagaccatgatatttcaatggaagaaggagaaaaaagagaagaggaaaatgggaccaatactgctgatcatgttcgaaattccagttgggcaaaaaacggctcctaccaaggtgctcttcataacgcctctgaagaagccacagaacaaaacatacgagctggtacccaggcagttttgcaggtgtttattataaactcatcaaatatatttcttcttgaacctgcaaatgaaataaaaaatcttctggatgaacacacagatatgtgtaaacgcattcttaacatttatcggtacatggttgtacaagtatcaatggacaaaaagacttgggaacagatgctgcttgtgttgctcagagtcacggaatctgtactgaagatgccatcacaagcttttctacagttccaagggaaaaaaaatatgaccttggcaggtcgacttgcaggaccacttttccagacccttatagttgcctggatcaaagcaaacctaaatgtgtacatctcccgagaactttgggatgacttactgtcagtattgtcatcgctgacctattgggaagagttggccactgagtggtcactgactatggagacattaactaaagttttagctaggaatttatatagtttggatctcagtgatttaccattggataagctgagtgaacagaaacaaaaaaagcacaaagggaaaggagttggacatgaatttcagaaagtttcagttgacaagtcattttctagaggatggagtcgtgatcagcctggccaagccccaatgagacagaggagtgcaacaaccactggttctccaggaaccgaaaaggcgaggagtatagtacggcaaaaaactgtcgatattgatgatgctcaaatacttccccgctcaactagagtcagacatttttcacaaagtgaagaaactggaaatgaagtttttggtgctttgaatgaggagcagccattgcctcgaagtagcagcacttctgacatcttggaaccattcactgttgaacgagccaaagtcaataaagaggacatgagccaaaaactgcctcctcttaatagtgatattggcggcagcagtgctaatgttcctgatctgatggatgagtttatagcagaacgacttcgaagtggtaatgcctcgactatgacaagaagaggaagtagtccaggcagcctggaaattcccaaagacctccctgatattctaaacaagcagaaccagatgcgccctattgatgacccaggtgtgccctcagaatggacttctcctgccagtgcagggagcagtgatcttatcagctcagatagtcattcggattctttcagcgctttccaatatgatggccgaaaatttgacaattttggctttggaaccgacactggggttacgtcctctgctgatgtggattcaggttctggccatcatcagagtgctgaagagcaggaagtggctagtctaactactcttcatatagattctgaaacaagcagtcttaatcagcaagctttctctgctgaagttgcaactattactggttcagaaagtgcttccccagtccactcacctctgggctccaggtcacagactccttccccttctacattgaatatagatcacatggaacagaaggatctgcagctcgacgagaagctccaccactctgttcttcagacaccagatgatctagaaattagtgaatttccatcagaatgttgtagtgtgatggcaggaggtactctgactggatggcatgctgatgttgctactgtaatgtggcgaagaatgctaggcattttgggagatgtaaattcaatcatggatcctgaaatacatgctcaagtttttgattacctctgtgaactttggcagaatctagctaagattagagataaccttggcatttcaactgataacctgacctccccttctccaccagttttaattcctccactgagaattcttacaccttggctttttaaggcaaccatgttgactgataaatataaacaaggtaaattacatgcatataaacttatttgtaatacaatgaaaagaagacaagatgtttctccaaatagagattttctaacacatttctacaatataatgcattgtggattacttcatattgaccaggatattgtcaatacaatcatcaaacactgctcacctcaatttttttcacttggtttgcctggtgccacaatgcttattatggattttattgtagcagctggtagagtggcttcttcagcttttctcaatgcaccaagagtagaagcacaagttcttctgggatctttggtttgctttcccaacttatattgtgaactgccttctcttcatcccaacattcctgatgttgctgtgtctcagtttacagatgttaaggaacttataatcaaaactgtattaagctcggcaagagatgagccctctggtcctgcacgatgtgtagcactttgtagtttaggtatttggatttgtgaagaactagtccatgagtctcatcatcctcaaattaaggaagctctgaatgtgatttgtgtttccttaaagtttactaataaaacagtagcccacgtagcttgtaacatgcttcacatgctggttcattatgtacctagacttcagatttaccagcctgattctcccttgaaaattattcaaatcctaatagctaccatcacccatcttttaccaagtacagaggcttcatcttatgaaatggacaagagggtaatttaaattttgtttgatgattagtatgtgg

SEQ ID NO: 90 - DNA, 2946 bp, Homo sapien
gcgggaaggtgttcgtcttttcttactatggttgcaagctcttcagaataactgtagcaaagaacagctctggatgttttcatgcttaatccctggattttcagcaccacagtctgaacatggacctcgaactttagataatctcattaatcctccactcaaccttcaagaaactcaagtcactatagaagaaatcactcctcttgtccccccacaatcaggagataaagggcaagaagatctcacaagctattttcttgaagcacttctaaaatacatagtcattcaggtaaaaagtttagaatggaagaacaaagaaaaccaagaaaggggattttcatttttgttttcacattttaagaaatattacttgccttatatttttccaaacatctgtaaggaaaacagtttatatcatcctatacttgacatcccgcagatgagaccaaagccacattatgtcgtgataaagaaagatgctgaaaccaatgaagcaatctattgtacaaaggagcctttcattaaggctcgtgttattgtcattcgttggctggtttctttctggctggagccaaaaccacatacaggacctcatattcctgggatggaaggtgaagtcttgccaaagaatattcagagagcagctgctagtttagtatccagagaagaaagcaaaaatgataatgctgataaaacagacagaactacagaacccgaacagtctcattccaatacaagcactctcacggagcgagaacctagctcatctagtctctgtagtattgatgaagaacatctcacagacattgaaatagttcgcagagttttttcttctaaaaggagtaatgtaaactttgtgacagagatatttcgtcaggcatttttattaccaatttgtgaagcagcagctatgagaaaagtggtaaaagtatatcaagaatggatccaacaagaggaaaaacctttgttcatgcaagagcctgaagaaattgtgatcacttcttcagacctcccttgcattgaaaatgtcacagaccatgatatttcaatggaagaaggagaaaaaagagaagaggaaaatgggaccaatactgctgatcatgttcgaaattccagttgggcaaaaaacggctcctaccaaggtgctcttcataacgcctctgaagaagccacagaacaaaacatacgagctggtacccaggcagttttgcaggtgtttattataaactcatcaaatatatttcttcttgaacctgcaaatgaaataaaaaatcttctggatgaacacacagatatgtgtaaacgcattcttaacatttatcggtacatggttgtacaagtatcaatggacaaaaagacttgggaacagatgctgcttgtgttgctcagagtcacggaatctgtactgaagatgccatcacaagcttttctacagttccaagggaaaaaaaatatgaccttggcaggtcgacttgcaggaccacttttccagacccttatagttgcctggatcaaagcaaacctaaatgtgtacatctcccgagaactttgggatgacttactgtcagtattgtcatcgctgacctattgggaagagttggccactgagtggtcactgactatggagacattaactaaagttttagctaggaatttatatagtttggatctcagtgatttaccattggataagctgagtgaacagaaacaaaaaaagcacaaagggaaaggagttggacatgaatttcagaaagtttcagttgacaagtcattttctagaggatggagtcgtgatcagcctggccaagccccaatgagacagaggagtgcaacaaccactggttctccaggaaccgaaaaggcgaggagtatagtacggcaaaaaactgtcgatattgatgatgctcaaatacttccccgctcaactagagtcagacatttttcacaaagtgaagaaactggaaatgaagtttttggtgctttgaatgaggagcagccattgcctcgaagtagcagcacttctgacatcttggaaccattcactgttgaacgagccaaagtcaataaagaggacatgagccaaaaactgcctcctcttaatagtgatattggcggcagcagtgctaatgttcctgatctgatggatgagtttatagcagaacgacttcgaagtggtaatgcctcgactatgacaagaagaggaagtagtccaggcagcctggaaattcccaaagacctccctgatattctaaacaagcagaaccagatgcgccctattgatgacccaggtgtgccctcagaatggacttctcctgccagtgcagggagcagtgatcttatcagctcagatagtcattcggattctttcagcgctttccaatatgatggccgaaaatttgacaattttggctttggaaccgacactggggttacgtcctctgctgatgtggattcaggttctggccatcatcagagtgctgaagagcaggaagtggctagtctaactactcttcatatagattctgaaacaagcagtcttaatcagcaagctttctctgctgaagttgcaactattactggtaaagttattcatgggaatgtgtttcttaaatgtattttttaagccttcaaagaatttgattaaaattttgagagattttaagtattacttattactatttaagtatattttttcattcatctttatgtaacaatgaaggggagaaaagacattagtttcttgacctgaggtccactgggttaagcttcagaggactctgtgaacttgtagtattttatgcaatattttgtatatatatgcactagaacattttctgcaggattaaaaaaaaattttaatgggaacataatagatgtatatgtatatggagtacatgagatagttggagtgatttttaaaataaataaaaaagttaaaagtaaaaa

SEQ ID NO: 91 - DNA, 398 bp, Homo sapien
taacccaggagtctaagttatgttcctttttcttttttaaataatactcataatttgaacaacatatttatatcagaaaaaggaacataacccaggagtctaagttaaatctaatattgttaatactgaacttgcaggtccaggttggtatacattccaccctctagaagtattttcttacagtagataagctgctcacattttgttttgaatgggcatctcctgaggaaatgtagcatgacattggtactaactgcatgtgtaaatacatcatactggcaaaccgtaaaatataaattatgtatcatcattcatgtagtatctataatttgtaacagtgggggggaaagatgacatggtatttaataatacaataaaaatattcttatcacttccta

SEQ ID NO: 92 - DNA, 1064 bp, Homo sapien
gcgggaaggtgttcgtcttttcttactatggttgcaagctcttcagaataactgtagcaaagaacagctctggatgttttcatgcttaatccctggattttcagcaccacagtctgaacatggacctcgaactttagataatctcattaatcctccactcaaccttcaagaaactcaagtcactatagaagaaatcactcctcttgtccccccacaatcaggagataaagggcaagaagatctcacaagctattttcttgaagcacttctaaaatacatagtcattcaggtaaaaagtttagaatggaagaacaaagaaaaccaagaaaggggattttcatttttgttttcacattttaagaaatattacttgccttatatttttccaaacatctgtaaggaaaacagtttatatcatcctatacttgacatcccgcagatgagaccaaagccacattatgtcgtgataaagaaagatgctgaaaccaatgaagcaatctattgtacaaaggagcctttcattaaggctcgtgttattgtcattcgttggctggtttctttctggctggagccaaaaccacatacaggacctcatattcctgggatggaaggtgaagtcttgccaaagaatattcagagagcagctgctagtttagtatccagagaagaaagcaaaaatgataatgctgataaaacagacagaactacagaacccgaacagtctcattccaatacaagcactctcacggagcgagaacctagctcatctagtctctgtagtattgatgaagaacatctcacagacattgaaatagttcgcagagttttttcttctaaaaggagtaatgtaaactttgtgacagagatatttcgtcaggtaacatacctctcagtatttttaatttataaggaaggcttttatctttaatattaaacatactgatttttagctgggaacagtggtgtgtacctttagttgtagttgttcaggaggctgaggtgggagaatcgcttgagcccaggagtttgaggccactttggacaacatggagagactgcatctc

SEQ ID NO: 93 - DNA, 2846 bp, Homo sapien
gcgggaaggtgttcgtcttttcttactatggttgcaagctcttcagaataactgtagcaaagaacagctctggatgttttcatgcttaatccctggattttcagcaccacagtctgaacatggacctcgaactttagataatctcattaatcctccactcaaccttcaagaaactcaagtcactatagaagaaatcactcctcttgtccccccacaatcaggagataaagggcaagaagatctcacaagctattttcttgaagcacttctaaaatacatagtcattcaggtaaaaagtttagaatggaagaacaaagaaaaccaagaaaggggattttcatttttgttttcacattttaagaaatattacttgccttatatttttccaaacatctgtaaggaaaacagtttatatcatcctatacttgacatcccgcagatgagaccaaagccacattatgtcgtgataaagaaagatgctgaaaccaatgaagcaatctattgtacaaaggagcctttcattaaggctcgtgttattgtcattcgttggctggtttctttctggctggagccaaaaccacatacaggacctcatattcctgggatggaaggtgaagtcttgccaaagaatattcagagagcagctgctagtttagtatccagagaagaaagcaaaaatgataatgctgataaaacagacagaactacagaacccgaacagtctcattccaatacaagcactctcacggagcgagaacctagctcatctagtctctgtagtattgatgaagaacatctcacagacattgaaatagttcgcagagttttttcttctaaaaggagtaatgtaaactttgtgacagagatatttcgtcaggcatttttattaccaatttgtgaagcagcagctatgagaaaagtggtaaaagtatatcaagaatggatccaacaagaggaaaaacctttgttcatgcaagagcctgaagaaattgtgatcacttcttcagacctcccttgcattgaaaatgtcacagaccatgatatttcaatggaagaaggagaaaaaagagaagaggaaaatgggaccaatactgctgatcatgttcgaaattccagttgggcaaaaaacggctcctaccaaggtgctcttcataacgcctctgaagaagccacagaacaaaacatacgagctggtacccaggcagttttgcaggtgtttattataaactcatcaaatatatttcttcttgaacctgcaaatgaaataaaaaatcttctggatgaacacacagatatgtgtaaacgcattcttaacatttatcggtacatggttgtacaagtatcaatggacaaaaagacttgggaacagatgctgcttgtgttgctcagagtcacggaatctgtactgaagatgccatcacaagcttttctacagttccaagggaaaaaaaatatgaccttggcaggtcgacttgcaggaccacttttccagacccttatagttgcctggatcaaagcaaacctaaatgtgtacatctcccgagaactttgggatgacttactgtcagtattgtcatcgctgacctattgggaagagttggccactgagtggtcactgactatggagacattaactaaagttttagctaggaatttatatagtttggatctcagtgatttaccattggataagctgagtgaacagaaacaaaaaaagcacaaagggaaaggagttggacatgaatttcagaaagtttcagttgacaagtcattttctagaggatggagtcgtgatcagcctggccaagccccaatgagacagaggagtgcaacaaccactggttctccaggaaccgaaaaggcgaggagtatagtacggcaaaaaactgtcggctaatgaagaaaagccatatgatcacatcaatagatgcagaaaaaacatttggcaaaatccaacacccatttaggataaaaactctcagcaargtagraataaggagaacttcctcaacttgataaatctattaaaaaataaaaacacaggacaacttacctctagcatcatacttaatggtgagaaactaggtttttttctgctgagatccacaacaaggcaaggatatctcactattcctgtaagacaggaaaaggaaataaaaggtctacagattgagaagaaataaataaagctatctttgtagatgacatgattatttatgtggaaaatttcaaagtgacaacctcctgaaactaataagcaattatagcaaggttataggatgccagattaatatataaaagtcagtcgctccttccataccagcaatgaacaactggaatgtgaaactgaaagcacagtaccatttacattagcatcaaaaatctccaaaacaattaggtataaatctagcaaaatatttacaagatctatatgaggaaaactatgaaactttgatgaaagaaatcaaagaataaataagttgagaggtctagttcatgtacatggatagaaaaactcactattggcaagatgtcatttttttccctacttaatctgtagattcaacacaatctcagttgattttgttcttaacaagttattttgtggatattgacagaatctaaaatttatatagaaaggcagagcatgagcaacatggcaaaacctgtctctacaaaaaatacaaaaactagttggatgtggtgtcatgtgcctgtagtcccagctacttgggagcctgagatgggaggattgcttaagttcaggaggtcaaggctgcagtgagccatgattgtgcccctgcactctctagcctgggtaacacagcaagatcttgtatcagaaa

SEQ ID NO: 94 - DNA, 7237 bp, Homo sapien
gcgggaaggtgttcgtcttttcttactatggttgcaagctcttcagaataactgtagcaaagaacagctctggatgttttcatgcttaatccctggattttcagcaccacagtctgaacatggacctcgaactttagataatctcattaatcctccactcaaccttcaagaaactcaagtcactatagaagaaatcactcctcttgtccccccacaatcaggagataaagggcaagaagatctcacaagctattttcttgaagcacttctaaaatacatagtcattcaggtaaaaagtttagaatggaagaacaaagaaaaccaagaaaggggattttcatttttgttttcacattttaagaaatattacttgccttatatttttccaaacatctgtaaggaaaacagtttatatcatcctatacttgacatcccgcagatgagaccaaagccacattatgtcgtgataaagaaagatgctgaaaccaatgaagcaatctattgtacaaaggagcctttcattaaggctcgtgttattgtcattcgttggctggtttctttctggctggagccaaaaccacatacaggacctcatattcctgggatggaaggtgaagtcttgccaaagaatattcagagagcagctgctagtttagtatccagagaagaaagcaaaaatgataatgctgataaaacagacagaactacagaacccgaacagtctcattccaatacaagcactctcacggagcgagaacctagctcatctagtctctgtagtattgatgaagaacatctcacagacattgaaatagttcgcagagttttttcttctaaaaggagtaatgtaaactttgtgacagagatatttcgtcaggcatttttattaccaatttgtgaagcagcagctatgagaaaagtggtaaaagtatatcaagaatggatccaacaagaggaaaaacctttgttcatgcaagagcctgaagaaattgtgatcacttcttcagacctcccttgcattgaaaatgtcacagaccatgatatttcaatggaagaaggagaaaaaagagaagaggaaaatgggaccaatactgctgatcatgttcgaaattccagttgggcaaaaaacggctcctaccaaggtgctcttcataacgcctctgaagaagccacagaacaaaacatacgagctggtacccaggcagttttgcaggtgtttattataaactcatcaaatatatttcttcttgaacctgcaaatgaaataaaaaatcttctggatgaacacacagatatgtgtaaacgcattcttaacatttatcggtacatggttgtacaagtatcaatggacaaaaagacttgggaacagatgctgcttgtgttgctcagagtcacggaatctgtactgaagatgccatcacaagcttttctacagttccaagggaaaaaaaatatgaccttggcaggtcgacttgcaggaccacttttccagacccttatagttgcctggatcaaagcaaacctaaatgtgtacatctcccgagaactttgggatgacttactgtcagtattgtcatcgctgacctattgggaagagttggccactgagtggtcactgactatggagacattaactaaagttttagctaggaatttatatagtttggatctcagtgatttaccattggataagctgagtgaacagaaacaaaaaaagcacaaagggaaaggagttggacatgaatttcagaaagtttcagttgacaagtcattttctagaggatggagtcgtgatcagcctggccaagccccaatgagacagaggagtgcaacaaccactggttctccaggaaccgaaaaggcgaggagtatagtacggcaaaaaactgtcgccatgagaagccgatccattggtgaatgtgctctgccatcggcctatatacgcagtgctaaaagtgctcctgttctgatccatacttccaaacccttcttgcctgatattgttctcactcccctttctgatgagctttcagatattgatgatgctcaaatacttccccgctcaactagagtcagacatttttcacaaagtgaagaaactggaaatgaagtttttggtgctttgaatgaggagcagccattgcctcgaagtagcagcacttctgacatcttggaaccattcactgttgaacgagccaaagtcaataaagaggacatgagccaaaaactgcctcctcttaatagtgatattggcggcagcagtgctaatgttcctgatctgatggatgagtttatagcagaacgacttcgaagtggtaatgcctcgactatgacaagaagaggaagtagtccaggcagcctggaaattcccaaagacctccctgatattctaaacaagcagaaccagatgcgccctattgatgacccaggtgtgccctcagaatggacttctcctgccagtgcagggagcagtgatcttatcagctcagatagtcattcggattctttcagcgctttccaatatgatggccgaaaatttgacaattttggctttggaaccgacactggggttacgtcctctgctgatgtggattcaggttctggccatcatcagagtgctgaagagcaggaagtggctagtctaactactcttcatatagattctgaaacaagcagtcttaatcagcaagctttctctgctgaagttgcaactattactggttcagaaagtgcttccccagtccactcacctctgggctccaggtcacagactccttccccttctacattgaatatagatcacatggaacagaaggatctgcagctcgacgagaagctccaccactctgttcttcagacaccagatgatctagaaattagtgaatttccatcagaatgttgtagtgtgatggcaggaggtactctgactggatggcatgctgatgttgctactgtaatgtggcgaagaatgctaggcattttgggagatgtaaattcaatcatggatcctgaaatacatgctcaagtttttgattacctctgtgaactttggcagaatctagctaagattagagataaccttggcatttcaactgataacctgacctccccttctccaccagttttaattcctccactgagaattcttacaccttggctttttaaggcaaccatgttgactgataaatataaacaaggtaaattacatgcatataaacttatttgtaatacaatgaaaagaagacaagatgtttctccaaatagagattttctaacacatttctacaatataatgcattgtggattacttcatattgaccaggatattgtcaatacaatcatcaaacactgctcacctcaatttttttcacttggtttgcctggtgccacaatgcttattatggattttattgtagcagctggtagagtggcttcttcagcttttctcaatgcaccaagagtagaagcacaagttcttctgggatctttggtttgctttcccaacttatattgtgaactgccttctcttcatcccaacattcctgatgttgctgtgtctcagtttacagatgttaaggaacttataatcaaaactgtattaagctcggcaagagatgagccctctggtcctgcacgatgtgtagcactttgtagtttaggtatttggatttgtgaagaactagtccatgagtctcatcatcctcaaattaaggaagctctgaatgtgatttgtgtttccttaaagtttactaataaaacagtagcccacgtagcttgtaacatgcttcacatgctggttcattatgtacctagacttcagatttaccagcctgattctcccttgaaaattattcaaatcctaatagctaccatcacccatcttttaccaagtacagaggcttcatcttatgaaatggacaagaggttggtagtatctttacttctctgccttctggactggatcatggccttacctctaaagacactgctccaaccatttcatgctacgggagcagaaagcgataaaacagaaaaatctgttctcaattgcatttataaggttttacatgggtgtgtttatggagctcagtgttttagcaatccaaggtattttcccatgagcctctctgatttggcatctgtagattatgatccttttatgcatttggaaagtctgaaagagcctgagcctctgcactctcctgactcagaacgatcttctaaactccagccagtaacagaagtgaaaactcaaatgcagcatggattaatctctatagcagcccgcactgttattacacatctggtaaatcacctgggccattatccaatgagcggtggtcctgctatgctaacaagtcaggtgtgtgaaaatcacgacaatcattacagtgaaagtactgaactttctcctgaactctttgagagtccaaatatccagttctttgtgttaaataatacaaccttagtgtcctgtatccagatcagatcagaagagaatatgcctggaggaggtttatctgctggccttgcatcagccaattcaaatgtcagaatcatagtacgtgatctctctggaaaatattcatgggattctgctatactgtatggcccacctcctgtaagtggcttgtcagaacctacatctttcatgctttcattgtctcaccaagagaagccagaagagcctccgacatctaatgaatgcttagaagatataaccgtaaaagatggactttctctccagtttaaaagatttagagaaactgtaccaacttgggatacaataagagatgaagaagatgttcttgatgagctcttgcagtatttgggtgttactagtcctgaatgcttacagagaactggaatctcacttaatattcctgctccacaacctgtgtgcatttctgaaaaacaagaaaatgatgttattaatgctatccttaagcaacatacagaagaaaaagaatttgttgagaagcactttaatgacttaaacatgaaagctgtggaacaagatgaaccaatacctcaaaaacctcagtcagcattttattattgcagattgcttcttagtatattgggaatgaattcctgggacaaacggaggagctttcatctcctgaagaaaaatgaaaagctacttagagaacttaggaacttggattcaaggcagtgccgagagacacacaagattgcagtattttatgttgctgaaggacaagaagacaaacactccattctcaccaatacaggaggaagtcaagcatatgaagattttgtagctggtcttggttgggaggtaaatcttacaaaccattgtggttttatgggaggactacaaaaaaacaaaagcactggattgaccactccatattttgctacctctacagtagaggtaatatttcacgtgtcaacaagaatgccttctgattctgatgattctttgaccaaaaaattgagacatttgggaaatgatgaagtgcacattgtttggtcagagcatactagagactacaggagaggaattattcccacagaatttggtgatgtccttattgtaatatatccaatgaaaaatcacatgttcagtattcagataatgaaaaaaccagaggttcccttctttggtcccctttttgatggtgctattgtgaatggaaaggttctacccattatggttagagcaacagctataaatgcaagccgtgctctgaaatctctgattccattgtatcaaaacttctatgaggagagagcacgatacctgcaaacaattgtccagcaccacttagaaccaacaacatttgaagattttgcagcacaggttttttctccagctccctaccaccatttaccatctgatgccgatcattaaatatcagttctgtttatctgaagggctcctacccagagattctacccagtgaaactcccacagcaacgcaggtagatggggctgacctggcctctccaatgtctcctcgaactagcaaaagccgcatgtccatgaagctgcgtcgttcctctggctcagccaataaatcctaaggagacaagcagcccagcagtgatcagcagtagccaccttagcacgaacatagggttaaccctttcaggccttcatgtctgccataacatgcatgtttcttcctgtacatttatttgagaaaacactggatttaaataattttaaataatttgtagcttaatattaaagatttaagttatttattgtttcattttttttcccacaatccaagctgccatattttgagggcagggggagttttattctacaccctttaccttcctagataattatgtctaagtagttttatctttaatttcatggttaactgtgagccaaaatacaattggacaattagtctcattatttattgtgccccattgcaactttatggttcaataaatatataattttttacaaatgtaaaattttacatttaagcatttgtaaagttacagcaaaagatgtacctgttaatacacagaatgtgtacagattatttgttatgacaataaaacactcaaaataaatggtctttagcatctcaaattccaactgaaatcattttagtattaactcttcttcccaaagcaatgtctcatttcttggctgtgcaggtgatgccatgttatatccaataactagaaaaatcactgtgctgaacttttatgtttagcttccaagtatttttctaatgttttgcatttcaagtggtatcactgttaaatgccatttgttttcagattgtggccttttattattggctgctagatcctggtgtttctatgttcttttttaagcaccaaaaagaagatggggaagaaaagaaggaaaattttctgatataaatatgttgttcaaattatgagtattatttaaaaaagaaaaaggaacataacccaggagtctaagttaaatctaatattgttaatactgaacttgcaggtccaggttggtatacattccaccctctagaagtattttcttacagtagataagctgctcacattttgttttgaatgggcatctcctgaggaaatgtagcatgacattggtactaactgcatgtgtaaatacatcatactggcaaaccgtaaaatataaattatgtatcatcattcatgtagtatctataatttgtaacagtgggggggaaagatgacatggtatttaataatacaataaaaatattcttatcacttccta

SEQ ID NO: 95 - DNA, 5594 bp, Homo sapien
ctacatttgaaaattttcttaataaaaaattgggaagaaaggggctttttaaaaagtcattacatgactcgtattgccagcaacatagtgaacttgatattctggagctattagatattcttgctagcatttcgtcgtaccactggtttgcaaatagagaaacctctaagactcttcttactcatttccttgaccaaaataaaactatgagtggaaaatggagtgatgagcagtaagcacactggaaaagtgggatgatcttgaagcaaattgctgataatcacttctgggattcagactgagacttgagcaagcttcaaggttggatgactgaattgaagacttccatgttaaattggttatcttgagaaggatacaagttaatttcagatattgatgatgctcaaatacttccccgctcaactagagtcagacatttttcacaaagtgaagaaactggaaatgaagtttttggtgctttgaatgaggagcagccattgcctcgaagtagcagcacttctgacatcttggaaccattcactgttgaacgagccaaagtcaataaagaggacatgagccaaaaactgcctcctcttaatagtgatattggcggcagcagtgctaatgttcctgatctgatggatgagtttatagcagaacgacttcgaagtggtaatgcctcgactatgacaagaagaggaagtagtccaggcagcctggaaattcccaaagacctccctgatattctaaacaagcagaaccagatgcgccctattgatgacccaggtgtgccctcagaatggacttctcctgccagtgcagggagcagtgatcttatcagctcagatagtcattcggattctttcagcgctttccaatatgatggccgaaaatttgacaattttggctttggaaccgacactggggttacgtcctctgctgatgtggattcaggttctggccatcatcagagtgctgaagagcaggaagtggctagtctaactactcttcatatagattctgaaacaagcagtcttaatcagcaagctttctctgctgaagttgcaactattactggttcagaaagtgcttccccagtccactcacctctgggctccaggtcacagactccttccccttctacattgaatatagatcacatggaacagaaggatctgcagctcgacgagaagctccaccactctgttcttcagacaccagatgatctagaaattagtgaatttccatcagaatgttgtagtgtgatggcaggaggtactctgactggatggcatgctgatgttgctactgtaatgtggcgaagaatgctaggcattttgggagatgtaaattcaatcatggatcctgaaatacatgctcaagtttttgattacctctgtgaactttggcagaatctagctaagattagagataaccttggcatttcaactgataacctgacctccccttctccaccagttttaattcctccactgagaattcttacaccttggctttttaaggcaaccatgttgactgataaatataaacaaggtaaattacatgcatataaacttatttgtaatacaatgaaaagaagacaagatgtttctccaaatagagattttctaacacatttctacaatataatgcattgtggattacttcatattgaccaggatattgtcaatacaatcatcaaacactgctcacctcaatttttttcacttggtttgcctggtgccacaatgcttattatggattttattgtagcagctggtagagtggcttcttcagcttttctcaatgcaccaagagtagaagcacaagttcttctgggatctttggtttgctttcccaacttatattgtgaactgccttctcttcatcccaacattcctgatgttgctgtgtctcagtttacagatgttaaggaacttataatcaaaactgtattaagctcggcaagagatgagccctctggtcctgcacgatgtgtagcactttgtagtttaggtatttggatttgtgaagaactagtccatgagtctcatcatcctcaaattaaggaagctctgaatgtgatttgtgtttccttaaagtttactaataaaacagtagcccacgtagcttgtaacatgcttcacatgctggttcattatgtacctagacttcagatttaccagcctgattctcccttgaaaattattcaaatcctaatagctaccatcacccatcttttaccaagtacagaggcttcatcttatgaaatggacaagaggttggtagtatctttacttctctgccttctggactggatcatggccttacctctaaagacactgctccaaccatttcatgctacgggagcagaaagcgataaaacagaaaaatctgttctcaattgcatttataaggttttacatgggtgtgtttatggagctcagtgttttagcaatccaaggtattttcccatgagcctctctgatttggcatctgtagattatgatccttttatgcatttggaaagtctgaaagagcctgagcctctgcactctcctgactcagaacgatcttctaaactccagccagtaacagaagtgaaaactcaaatgcagcatggattaatctctatagcagcccgcactgttattacacatctggtaaatcacctgggccattatccaatgagcggtggtcctgctatgctaacaagtcaggtgtgtgaaaatcacgacaatcattacagtgaaagtactgaactttctcctgaactctttgagagtccaaatatccagttctttgtgttaaataatacaaccttagtgtcctgtatccagatcagatcagaagagaatatgcctggaggaggtttatctgctggccttgcatcagccaattcaaatgtcagaatcatagtacgtgatctctctggaaaatattcatgggattctgctatactgtatggcccacctcctgtaagtggcttgtcagaacctacatctttcatgctttcattgtctcaccaagagaagccagaagagcctccgacatctaatgaatgcttagaagatataaccgtaaaagatggactttctctccagtttaaaagatttagagaaactgtaccaacttgggatacaataagagatgaagaagatgttcttgatgagctcttgcagtatttgggtgttactagtcctgaatgcttacagagaactggaatctcacttaatattcctgctccacaacctgtgtgcatttctgaaaaacaagaaaatgatgttattaatgctatccttaagcaacatacagaagaaaaagaatttgttgagaagcactttaatgacttaaacatgaaagctgtggaacaagatgaaccaatacctcaaaaacctcagtcagcattttattattgcagattgcttcttagtatattgggaatgaattcctgggacaaacggaggagctttcatctcctgaagaaaaatgaaaagctacttagagaacttaggaacttggattcaaggcagtgccgagagacacacaagattgcagtattttatgttgctgaaggacaagaagacaaacactccattctcaccaatacaggaggaagtcaagcatatgaagattttgtagctggtcttggttgggaggtaaatcttacaaaccattgtggttttatgggaggactacaaaaaaacaaaagcactggattgaccactccatattttgctacctctacagtagaggtaatatttcacgtgtcaacaagaatgccttctgattctgatgattctttgaccaaaaaattgagacatttgggaaatgatgaagtgcacattgtttggtcagagcatactagagactacaggagaggaattattcccacagaatttggtgatgtccttattgtaatatatccaatgaaaaatcacatgttcagtattcagataatgaaaaaaccagaggttcccttctttggtcccctttttgatggtgctattgtgaatggaaaggttctacccattatggttagagcaacagctataaatgcaagccgtgctctgaaatctctgattccattgtatcaaaacttctatgaggagagagcacgatacctgcaaacaattgtccagcaccacttagaaccaacaacatttgaagattttgcagcacaggttttttctccagctccctaccaccatttaccatctgatgccgatcattaaatatcagttctgtttatctgaagggctcctacccagagattctacccagtgaaactcccacagcaacgcaggtagatggggctgacctggcctctccaatgtctcctcgaactagcaaaagccgcatgtccatgaagctgcgtcgttcctctggctcagccaataaatcctaaggagacaagcagcccagcagtgatcagcagtagccaccttagcacgaacatagggttaaccctttcaggccttcatgtctgccataacatgcatgtttcttcctgtacatttatttgagaaaacactggatttaaataattttaaataatttgtagcttaatattaaagatttaagttatttattgtttcattttttttcccacaatccaagctgccatattttgagggcagggggagttttattctacaccctttaccttcctagataattatgtctaagtagttttatctttaatttcatggttaactgtgagccaaaatacaattggacaattagtctcattatttattgtgccccattgcaactttatggttcaataaatatataattttttacaaatgtaaaattttacatttaagcatttgtaaagttacagcaaaagatgtacctgttaatacacagaatgtgtacagattatttgttatgacaataaaacactcaaaataaatggtctttagcatctcaaattccaactgaaatcattttagtattaactcttcttcccaaagcaatgtctcatttcttggctgtgcaggtgatgccatgttatatccaataactagaaaaatcactgtgctgaacttttatgtttagcttccaagtatttttctaatgttttgcatttcaagtggtatcactgttaaatgccatttgttttcagattgtggccttttattattggctgctagatcctggtgtttctatgttcttttttaagcaccaaaaagaagatggggaagaaaagaaggaaaattttctgatataaatatgttgttcaaattatgagtattatttaaaaaagaaaaaggaacataacccaggagtctaagttaaatctaatattgttaatactgaacttgcaggtccaggttggtatacattccaccctctagaagtattttcttacagtagataagctgctcacattttgttttgaatgggcatctcctgaggaaatgtagcatgacattggtactaactgcatgtgtaaatacatcatactggcaaaccgtaaaatataaattatgtatcatcattcatgtagtatctataatttgtaacagtgggggggaaagatgacatggtatttaataatacaataaaaatattcttatcacttccta

SEQ ID NO: 96 - DNA, 7037 bp, Homo sapien
gcgggaaggtgttcgtcttttcttactatggttgcaagctcttcagaataactgtagcaaagaacagctctggatgttttcatgcttaatccctggattttcagcaccacagtctgaacatggacctcgaactttagataatctcattaatcctccactcaaccttcaagaaactcaagtcactatagaagaaatcactcctcttgtccccccacaatcaggagataaagggcaagaagatctcacaagctattttcttgaagcacttctaaaatacatagtcattcaggtaaaaagtttagaatggaagaacaaagaaaaccaagaaaggggattttcatttttgttttcacattttaagaaatattacttgccttatatttttccaaacatctgtaaggaaaacagtttatatcatcctatacttgacatcccgcagatgagaccaaagccacattatgtcgtgataaagaaagatgctgaaaccaatgaagcaatctattgtacaaaggagcctttcattaaggctcgtgttattgtcattcgttggctggtttctttctggctggagccaaaaccacatacaggacctcatattcctgggatggaaggtgaagtcttgccaaagaatattcagagagcagctgctagtttagtatccagagaagaaagcaaaaatgataatgctgataaaacagacagaactacagaacccgaacagtctcattccaatacaagcactctcacggagcgagaacctagctcatctagtctctgtagtattgatgaagaacatctcacagacattgaaatagttcgcagagttttttcttctaaaaggagtaatgtaaactttgtgacagagatatttcgtcaggcatttttattaccaatttgtgaagcagcagctatgagaaaagtggtaaaagtatatcaagaatggatccaacaagaggaaaaacctttgttcatgcaagagcctgaagaaattgtgatcacttcttcagacctcccttgcattgaaaatgtcacagaccatgatatttcaatggaagaaggagaaaaaagagaagaggaaaatgggaccaatactgctgatcatgttcgaaattccagttgggcaaaaaacggctcctaccaaggtgctcttcataacgcctctgaagaagccacagaacaaaacatacgagctggtacccaggcagttttgcaggtgtttattataaactcatcaaatatatttcttcttgaacctgcaaatgaaataaaaaatcttctggatgaacacacagatatgtgtaaacgcattcttaacatttatcggtacatggttgtacaagtatcaatggacaaaaagacttgggaacagatgctgcttgtgttgctcagagtcacggaatctgtactgaagatgccatcacaagcttttctacagttccaagggaaaaaaaatatgaccttggcaggtcgacttgcaggaccacttttccagacccttatagttgcctggatcaaagcaaacctaaatgtgtacatctcccgagaactttgggatgacttactgtcagtattgtcatcgctgacctattgggaagagttggccactgagtggtcactgactatggagacattaactaaagttttagctaggaatttatatagtttggatctcagtgatttaccattggataagctgagtgaacagaaacaaaaaaagcacaaagggaaaggagttggacatgaatttcagaaagtttcagttgacaagtcattttctagaggatggagtcgtgatcagcctggccaagccccaatgagacagaggagtgcaacaaccactggttctccaggaaccgaaaaggcgaggagtatagtacggcaaaaaactgtcgatattgatgatgctcaaatacttccccgctcaactagagtcagacatttttcacaaagtgaagaaactggaaatgaagtttttggtgctttgaatgaggagcagccattgcctcgaagtagcagcacttctgacatcttggaaccattcactgttgaacgagccaaagtcaataaagaggacatgagccaaaaactgcctcctcttaatagtgatattggcggcagcagtgctaatgttcctgatctgatggatgagtttatagcagaacgacttcgaagtggtaatgcctcgactatgacaagaagaggaagtagtccaggcagcctggaaattcccaaagacctccctgatattctaaacaagcagaaccagatgcgccctattgatgacccaggtgtgccctcagaatggacttctcctgccagtgcagggagcagtgatcttatcagctcagatagtcattcggattctttcagcgctttccaatatgatggccgaaaatttgacaattttggctttggaaccgacactggggttacgtcctctgctgatgtggattcaggttctggccatcatcagagtgctgaagagcaggaagtggctagtctaactactcttcatatagattctgaaacaagcagtcttaatcagcaagctttctctgctgaagttgcaactattactggttcagaaagtgcttccccagtccactcacctctgggctccaggtcacagactccttccccttctacattgaatatagatcacatggaacagaaggatctgcagctcgacgagaagctccaccactctgttcttcagacaccagatgatctagaaattagtgaatttccatcagaatgttgtagtgtgatggcaggaggtactctgactggatggcatgctgatgttgctactgtaatgtggcgaagaatgctaggcattttgggagatgtaaattcaatcatggatcctgaaatacatgctcaagtttttgattacctctgtgaactttggcagaatctagctaagattagagataaccttggcatttcaactgataacctgacctccccttctccaccagttttaattcctccactgagaattcttacaccttggctttttaaggcaaccatgttgactgataaatataaacaaggtaaattacatgcatataaacttatttgtaatacaatgaaaagaagacaagatgtttctccaaatagagattttctaacacatttctacaatataatgcattgtggattacttcatattgaccaggatattgtcaatacaatcatcaaacactgctcacctcaatttttttcacttggtttgcctggtgccacaatgcttattatggattttattgtagcagctggtagagtggcttcttcagcttttctcaatgcaccaagagtagaagcacaagttcttctgggatctttggtttgctttcccaacttatattgtgaactgccttctcttcatcccaacattcctgatgttgctgtgtctcagtttacagatgttaagatgtgtagcactttgtagtttaggtatttggatttgtgaagaactagtccatgagtctcatcatcctcaaattaaggaagctctgaatgtgatttgtgtttccttaaagtttactaataaaacagtagcccacgtagcttgtaacatgcttcacatgctggttcattatgtacctagacttcagatttaccagcctgattctcccttgaaaattattcaaatcctaatagctaccatcacccatcttttaccaagtacagaggcttcatcttatgaaatggacaagaggttggtagtatctttacttctctgccttctggactggatcatggccttacctctaaagacactgctccaaccatttcatgctacgggagcagaaagcgataaaacagaaaaatctgttctcaattgcatttataaggttttacatgggtgtgtttatggagctcagtgttttagcaatccaaggtattttcccatgagcctctctgatttggcatctgtagattatgatccttttatgcatttggaaagtctgaaagagcctgagcctctgcactctcctgactcagaacgatcttctaaactccagccagtaacagaagtgaaaactcaaatgcagcatggattaatctctatagcagcccgcactgttattacacatctggtaaatcacctgggccattatccaatgagcggtggtcctgctatgctaacaagtcaggtgtgtgaaaatcacgacaatcattacagtgaaagtactgaactttctcctgaactctttgagagtccaaatatccagttctttgtgttaaataatacaaccttagtgtcctgtatccagatcagatcagaagagaatatgcctggaggaggtttatctgctggccttgcatcagccaattcaaatgtcagaatcatagtacgtgatctctctggaaaatattcatgggattctgctatactgtatggcccacctcctgtaagtggcttgtcagaacctacatctttcatgctttcattgtctcaccaagagaagccagaagagcctccgacatctaatgaatgcttagaagatataaccgtaaaagatggactttctctccagtttaaaagatttagagaaactgtaccaacttgggatacaataagagatgaagaagatgttcttgatgagctcttgcagtatttgggtgttactagtcctgaatgcttacagagaactggaatctcacttaatattcctgctccacaacctgtgtgcatttctgaaaaacaagaaaatgatgttattaatgctatccttaagcaacatacagaagaaaaagaatttgttgagaagcactttaatgacttaaacatgaaagctgtggaacaagatgaaccaatacctcaaaaacctcagtcagcattttattattgcagattgcttcttagtatattgggaatgaattcctgggacaaacggaggagctttcatctcctgaagaaaaatgaaaagctacttagagaacttaggaacttggattcaaggcagtgccgagagacacacaagattgcagtattttatgttgctgaaggacaagaagacaaacactccattctcaccaatacaggaggaagtcaagcatatgaagattttgtagctggtcttggttgggaggtaaatcttacaaaccattgtggttttatgggaggactacaaaaaaacaaaagcactggattgaccactccatattttgctacctctacagtagaggtaatatttcacgtgtcaacaagaatgccttctgattctgatgattctttgaccaaaaaattgagacatttgggaaatgatgaagtgcacattgtttggtcagagcatactagagactacaggagaggaattattcccacagaatttggtgatgtccttattgtaatatatccaatgaaaaatcacatgttcagtattcagataatgaaaaaaccagaggttcccttctttggtcccctttttgatggtgctattgtgaatggaaaggttctacccattatggttagagcaacagctataaatgcaagccgtgctctgaaatctctgattccattgtatcaaaacttctatgaggagagagcacgatacctgcaaacaattgtccagcaccacttagaaccaacaacatttgaagattttgcagcacaggttttttctccagctccctaccaccatttaccatctgatgccgatcattaaatatcagttctgtttatctgaagggctcctacccagagattctacccagtgaaactcccacagcaacgcaggtagatggggctgacctggcctctccaatgtctcctcgaactagcaaaagccgcatgtccatgaagctgcgtcgttcctctggctcagccaataaatcctaaggagacaagcagcccagcagtgatcagcagtagccaccttagcacgaacatagggttaaccctttcaggccttcatgtctgccataacatgcatgtttcttcctgtacatttatttgagaaaacactggatttaaataattttaaataatttgtagcttaatattaaagatttaagttatttattgtttcattttttttcccacaatccaagctgccatattttgagggcagggggagttttattctacaccctttaccttcctagataattatgtctaagtagttttatctttaatttcatggttaactgtgagccaaaatacaattggacaattagtctcattatttattgtgccccattgcaactttatggttcaataaatatataattttttacaaatgtaaaattttacatttaagcatttgtaaagttacagcaaaagatgtacctgttaatacacagaatgtgtacagattatttgttatgacaataaaacactcaaaataaatggtctttagcatctcaaattccaactgaaatcattttagtattaactcttcttcccaaagcaatgtctcatttcttggctgtgcaggtgatgccatgttatatccaataactagaaaaatcactgtgctgaacttttatgtttagcttccaagtatttttctaatgttttgcatttcaagtggtatcactgttaaatgccatttgttttcagattgtggccttttattattggctgctagatcctggtgtttctatgttcttttttaagcaccaaaaagaagatggggaagaaaagaaggaaaattttctgatataaatatgttgttcaaattatgagtattatttaaaaaagaaaaaggaacataacccaggagtctaagttaaatctaatattgttaatactgaacttgcaggtccaggttggtatacattccaccctctagaagtattttcttacagtagataagctgctcacattttgttttgaatgggcatctcctgaggaaatgtagcatgacattggtactaactgcatgtgtaaatacatcatactggcaaaccgtaaaatataaattatgtatcatcattcatgtagtatctataatttgtaacagtgggggggaaagatgacatggtatttaataatacaataaaaatattcttatcacttccta

SEQ ID NO: 97 - DNA, 7065 bp, Homo sapien
gcgggaaggtgttcgtcttttcttactatggttgcaagctcttcagaataactgtagcaaagaacagctctggatgttttcatgcttaatccctggattttcagcaccacagtctgaacatggacctcgaactttagataatctcattaatcctccactcaaccttcaagaaactcaagtcactatagaagaaatcactcctcttgtccccccacaatcaggagataaagggcaagaagatctcacaagctattttcttgaagcacttctaaaatacatagtcattcaggtaaaaagtttagaatggaagaacaaagaaaaccaagaaaggggattttcatttttgttttcacattttaagaaatattacttgccttatatttttccaaacatctgtaaggaaaacagtttatatcatcctatacttgacatcccgcagatgagaccaaagccacattatgtcgtgataaagaaagatgctgaaaccaatgaagcaatctattgtacaaaggagcctttcattaaggctcgtgttattgtcattcgttggctggtttctttctggctggagccaaaaccacatacaggacctcatattcctgggatggaaggtgaagtcttgccaaagaatattcagagagcagctgctagtttagtatccagagaagaaagcaaaaatgataatgctgataaaacagacagaactacagaacccgaacagtctcattccaatacaagcactctcacggagcgagaacctagctcatctagtctctgtagtattgatgaagaacatctcacagacattgaaatagttcgcagagttttttcttctaaaaggagtaatgtaaactttgtgacagagatatttcgtcaggcatttttattaccaatttgtgaagcagcagctatgagaaaagtggtaaaagtatatcaagaatggatccaacaagaggaaaaacctttgttcatgcaagagcctgaagaaattgtgatcacttcttcagacctcccttgcattgaaaatgtcacagaccatgatatttcaatggaagaaggagaaaaaagagaagaggaaaatgggaccaatactgctgatcatgttcgaaattccagttgggcaaaaaacggctcctaccaaggtgctcttcataacgcctctgaagaagccacagaacaaaacatacgagctggtacccaggcagttttgcaggtgtttattataaactcatcaaatatatttcttcttgaacctgcaaatgaaataaaaaatcttctggatgaacacacagatatgtgtaaacgcattcttaacatttatcggtacatggttgtacaagtatcaatggacaaaaagacttgggaacagatgctgcttgtgttgctcagagtcacggaatctgtactgaagatgccatcacaagcttttctacagttccaagggaaaaaaaatatgaccttggcaggtcgacttgcaggaccacttttccagacccttatagttgcctggatcaaagcaaacctaaatgtgtacatctcccgagaactttgggatgacttactgtcagtattgtcatcgctgacctattgggaagagttggccactgagtggtcactgactatggagacattaactaaagttttagctaggaatttatatagtttggatctcagtgatttaccattggataagctgagtgaacagaaacaaaaaaagcacaaagggaaaggagttggacatgaatttcagaaagtttcagttgacaagtcattttctagaggatggagtcgtgatcagcctggccaagccccaatgagacagaggagtgcaacaaccactggttctccaggaaccgaaaaggcgaggagtatagtacggcaaaaaactgtcgatattgatgatgctcaaatacttccccgctcaactagagtcagacatttttcacaaagtgaagaaactggaaatgaagtttttggtgctttgaatgaggagcagccattgcctcgaagtagcagcacttctgacatcttggaaccattcactgttgaacgagccaaagtcaataaagaggacatgagccaaaaactgcctcctcttaatagtgatattggcggcagcagtgctaatgttcctgatctgatggatgagtttatagcagaacgacttcgaagtggtaatgcctcgactatgacaagaagaggaagtagtccaggcagcctggaaattcccaaagacctccctgatattctaaacaagcagaaccagatgcgccctattgatgacccaggtgtgccctcagaatggacttctcctgccagtgcagggagcagtgatcttatcagctcagatagtcattcggattctttcagcgctttccaatatgatggccgaaaatttgacaattttggctttggaaccgacactggggttacgtcctctgctgatgtggattcaggttctggccatcatcagagtgctgaagagcaggaagtggctagtctaactactcttcatatagattctgaaacaagcagtcttaatcagcaagctttctctgctgaagttgcaactattactggttcagaaagtgcttccccagtccactcacctctgggctccaggtcacagactccttccccttctacattgaatatagatcacatggaacagaaggatctgcagctcgacgagaagctccaccactctgttcttcagacaccagatgatctagaaattagtgaatttccatcagaatgttgtagtgtgatggcaggaggtactctgactggatggcatgctgatgttgctactgtaatgtggcgaagaatgctaggcattttgggagatgtaaattcaatcatggatcctgaaatacatgctcaagtttttgattacctctgtgaactttggcagaatctagctaagattagagataaccttggcatttcaactgataacctgacctccccttctccaccagttttaattcctccactgagaattcttacaccttggctttttaaggcaaccatgttgactgataaatataaacaaggtaaattacatgcatataaacttatttgtaatacaatgaaaagaagacaagatgtttctccaaatagagattttctaacacatttctacaatataatgcattgtggattacttcatattgaccaggatattgtcaatacaatcatcaaacactgctcacctcaatttttttcacttggtttgcctggtgccacaatgcttattatggattttattgtagcagctggtagagtggcttcttcagcttttctcaatgcaccaagagtagaagcacaagttcttctgggatctttggtttgctttcccaacttatattgtgaactgccttctcttcatcccaacattcctgatgttgctgtgtctcagtttacagatgttaaggaacttataatcaaaactgtattaagctcggcaagagatgagccctctggtcctgcacgatgtgtagcactttgtagtttaggtatttggatttgtgaagaactagtccatgagtctcatcatcctcaaattaaggaagctctgaatgtgatttgtgtttccttaaagtttactaataaaacagtagcccacgtagcttgtaacatgcttcacatgctggttcattatgtacctagacttcagatttaccagcctgattctcccttgaaaattattcaaatcctaatagctaccatcacccatcttttaccaagtacagaggcttcatcttatgaaatggacaagaggttggtagtatctttacttctctgccttctggactggatcatggccttacctctaaagacactgctccaaccatttcatgctacgggagcagaaagcgataaaacagaaaaatctgttctcaattgcatttataaggttttacatgggtgtgtttatggagctcagtgttttagcaatccaaggtattttcccatgagcctctctgatttggcatctgtagattatgatccttttatgcatttggaaagtctgaaagagcctgagcctctgcactctcctgactcagaacgatcttctaaactccagccagtaacagaagtgaaaactcaaatgcagcatggattaatctctatagcagcccgcactgttattacacatctggtaaatcacctgggccattatccaatgagcggtggtcctgctatgctaacaagtcaggtgtgtgaaaatcacgacaatcattacagtgaaagtactgaactttctcctgaactctttgagagtccaaatatccagttctttgtgttaaataatacaaccttagtgtcctgtatccagatcagatcagaagagaatatgcctggaggaggtttatctgctggccttgcatcagccaattcaaatgtcagaatcatagtacgtgatctctctggaaaatattcatgggattctgctatactgtatggcccacctcctgtaagtggcttgtcagaacctacatctttcatgctttcattgtctcaccaagagaagccagaagagcctccgacatctaatgaatgcttagaagatataaccgtaaaagatggactttctctccagtttaaaagatttagagaaactgtaccaacttgggatacaataagagatgaagaagatgttcttgatgagctcttgcagtatttgggtgttactagtcctgaatgcttacagagaactggaatctcacttaatattcctgctccacaacctgtgtgcatttctgaaaaacaagaaaatgatgttattaatgctatccttaagcaacatacagaagaaaaagaatttgttgagaagcactttaatgacttaaacatgaaagctgtggaacaagatgaaccaatacctcaaaaacctcagtcagcattttattattgcagattgcttcttagtatattgggaatgaattcctgggacaaacggaggagctttcatctcctgaagaaaaatgaaaagctacttagagaacttaggaacttggattcaaggcagtgccgagagacacacaagattgcagtattttatgttgctgaaggacaagaagacaaacactccattctcaccaatacaggaggaagtcaagcatatgaagattttgtagctggtcttggttgggaggtaaatcttacaaaccattgtggttttatgggaggactacaaaaaaacaaaagcactggattgaccactccatattttgctacctctacagtagaggtaatatttcacgtgtcaacaagaatgccttctgattctgatgattctttgaccaaaaaattgagacatttgggaaatgatgaagtgcacattgtttggtcagagcatactagagactacaggagaggaattattcccacagaatttggtgatgtccttattgtaatatatccaatgaaaaatcacatgttcagtattcagataatgaaaaaaccagaggttcccttctttggtcccctttttgatggtgctattgtgaatggaaaggttctacccattatggttagagcaacagctataaatgcaagccgtgctctgaaatctctgattccattgtatcaaaacttctatgaggagagagcacgatacctgcaaacaattgtccagcaccacttagaaccaacaacatttgaagattttgcagcacaggttttttctccagctccctaccaccatttaccatctgatgccgggctcctacccagagattctacccagtgaaactcccacagcaacgcaggtagatggggctgacctggcctctccaatgtctcctcgaactagcaaaagccgcatgtccatgaagctgcgtcgttcctctggctcagccaataaatcctaaggagacaagcagcccagcagtgatcagcagtagccaccttagcacgaacatagggttaaccctttcaggccttcatgtctgccataacatgcatgtttcttcctgtacatttatttgagaaaacactggatttaaataattttaaataatttgtagcttaatattaaagatttaagttatttattgtttcattttttttcccacaatccaagctgccatattttgagggcagggggagttttattctacaccctttaccttcctagataattatgtctaagtagttttatctttaatttcatggttaactgtgagccaaaatacaattggacaattagtctcattatttattgtgccccattgcaactttatggttcaataaatatataattttttacaaatgtaaaattttacatttaagcatttgtaaagttacagcaaaagatgtacctgttaatacacagaatgtgtacagattatttgttatgacaataaaacactcaaaataaatggtctttagcatctcaaattccaactgaaatcattttagtattaactcttcttcccaaagcaatgtctcatttcttggctgtgcaggtgatgccatgttatatccaataactagaaaaatcactgtgctgaacttttatgtttagcttccaagtatttttctaatgttttgcatttcaagtggtatcactgttaaatgccatttgttttcagattgtggccttttattattggctgctagatcctggtgtttctatgttcttttttaagcaccaaaaagaagatggggaagaaaagaaggaaaattttctgatataaatatgttgttcaaattatgagtattatttaaaaaagaaaaaggaacataacccaggagtctaagttaaatctaatattgttaatactgaacttgcaggtccaggttggtatacattccaccctctagaagtattttcttacagtagataagctgctcacattttgttttgaatgggcatctcctgaggaaatgtagcatgacattggtactaactgcatgtgtaaatacatcatactggcaaaccgtaaaatataaattatgtatcatcattcatgtagtatctataatttgtaacagtgggggggaaagatgacatggtatttaataatacaataaaaatattcttatcacttccta

SEQ ID NO: 98 - DNA, 7036 bp, Homo sapien
gcgggaaggtgttcgtcttttcttactatggttgcaagctcttcagaataactgtagcaaagaacagctctggatgttttcatgcttaatccctggattttcagcaccacagtctgaacatggacctcgaactttagataatctcattaatcctccactcaaccttcaagaaactcaagtcactatagaagaaatcactcctcttgtccccccacaatcaggagataaagggcaagaagatctcacaagctattttcttgaagcacttctaaaatacatagtcattcaggtaaaaagtttagaatggaagaacaaagaaaaccaagaaaggggattttcatttttgttttcacattttaagaaatattacttgccttatatttttccaaacatctgtaaggaaaacagtttatatcatcctatacttgacatcccgcagatgagaccaaagccacattatgtcgtgataaagaaagatgctgaaaccaatgaagcaatctattgtacaaaggagcctttcattaaggctcgtgttattgtcattcgttggctggtttctttctggctggagccaaaaccacatacaggacctcatattcctgggatggaaggtgaagtcttgccaaagaatattcagagagcagctgctagtttagtatccagagaagaaagcaaaaatgataatgctgataaaacagacagaactacagaacccgaacagtctcattccaatacaagcactctcacggagcgagaacctagctcatctagtctctgtagtattgatgaagaacatctcacagacattgaaatagttcgcagagttttttcttctaaaaggagtaatgtaaactttgtgacagagatatttcgtcaggcatttttattaccaatttgtgaagcagcagctatgagaaaagtggtaaaagtatatcaagaatggatccaacaagaggaaaaacctttgttcatgcaagagcctgaagaaattgtgatcacttcttcagacctcccttgcattgaaaatgtcacagaccatgatatttcaatggaagaaggagaaaaaagagaagaggaaaatgggaccaatactgctgatcatgttcgaaattccagttgggcaaaaaacggctcctaccaaggtgctcttcataacgcctctgaagaagccacagaacaaaacatacgagctggtacccaggcagttttgcaggtgtttattataaactcatcaaatatatttcttcttgaacctgcaaatgaaataaaaaatcttctggatgaacacacagatatgtgtaaacgcattcttaacatttatcggtacatggttgtacaagtatcaatggacaaaaagacttgggaacagatgctgcttgtgttgctcagagtcacggaatctgtactgaagatgccatcacaagcttttctacagttccaagggaaaaaaaatatgaccttggcaggtcgacttgcaggaccacttttccagacccttatagttgcctggatcaaagcaaacctaaatgtgtacatctcccgagaactttgggatgacttactgtcagtattgtcatcgctgacctattgggaagagttggccactgagtggtcactgactatggagacattaactaaagttttagctaggaatttatatagtttggatctcagtgatttaccattggataagctgagtgaacagaaacaaaaaaagcacaaagggaaaggagttggacatgaatttcagaaagtttcagttgacaagtcattttctagaggatggagtcgtgatcagcctggccaagccccaatgagacagaggagtgcaacaaccactggttctccaggaaccgaaaaggcgaggagtatagtacggcaaaaaactgtcgatattgatgatgctcaaatacttccccgctcaactagagtcagacatttttcacaaagtgaagaaactggaaatgaagtttttggtgctttgaatgaggagcagccattgcctcgaagtagcagcacttctgacatcttggaaccattcactgttgaacgagccaaagtcaataaagaggacatgagccaaaaactgcctcctcttaatagtgatattggcggcagcagtgctaatgttcctgatctgatggatgagtttatagcagaacgacttcgaagtggtaatgcctcgactatgacaagaagaggaagtagtccaggcagcctggaaattcccaaagacctccctgatattctaaacaagcagaaccagatgcgccctattgatgacccaggtgtgccctcagaatggacttctcctgccagtgcagggagcagtgatcttatcagctcagatagtcattcggattctttcagcgctttccaatatgatggccgaaaatttgacaattttggctttggaaccgacactggggttacgtcctctgctgatgtggattcaggttctggccatcatcagagtgctgaagagcaggaagtggctagtctaactactcttcatatagattctgaaacaagcagtcttaatcagcaagctttctctgctgaagttgcaactattactggttcagaaagtgcttccccagtccactcacctctgggctccaggtcacagactccttccccttctacattgaatatagatcacatggaacagaaggatctgcagctcgacgagaagctccaccactctgttcttcagacaccagatgatctagaaattagtgaatttccatcagaatgttgtagtgtgatggcaggaggtactctgactggatggcatgctgatgttgctactgtaatgtggcgaagaatgctaggcattttgggagatgtaaattcaatcatggatcctgaaatacatgctcaagtttttgattacctctgtgaactttggcagaatctagctaagattagagataaccttggcatttcaactgataacctgacctccccttctccaccagttttaattcctccactgagaattcttacaccttggctttttaaggcaaccatgttgactgataaatataaacaaggtaaattacatgcatataaacttatttgtaatacaatgaaaagaagacaagatgtttctccaaatagagattttctaacacatttctacaatataatgcattgtggattacttcatattgaccaggatattgtcaatacaatcatcaaacactgctcacctcaatttttttcacttggtttgcctggtgccacaatgcttattatggattttattgtagcagctggtagagtggcttcttcagcttttctcaatgcaccaagagtagaagcacaagttcttctgggatctttggtttgctttcccaacttatattgtgaactgccttctcttcatcccaacattcctgatgttgctgtgtctcagtttacagatgttaaggaacttataatcaaaactgtattaagctcggcaagagatgagccctctggtcctgcacgatgtgtagcactttgtagtttaggtatttggatttgtgaagaactagtccatgagtctcatcatcctcaaattaaggaagctctgaatgtgatttgtgtttccttaaagtttactaataaaacagtagcccacgtagcttgtaacatgcttcacatgctggttcattatgtacctagacttcagatttaccagcctgattctcccttgaaaattattcaaatcctaatagctaccatcacccatcttttaccaagtacagaggcttcatcttatgaaatggacaagaggttggtagtatctttacttctctgccttctggactggatcatggccttacctctaaagacactgctccaaccatttcatgctacgggagcagaaagcgataaaacagaaaaatctgttctcaattgcatttataaggttttacatgggtgtgtttatggagctcagtgttttagcaatccaaggtattttcccatgagcctctctgatttggcatctgtagattatgatccttttatgcatttggaaagtctgaaagagcctgagcctctgcactctcctgactcagaacgatcttctaaactccagccagtaacagaagtgaaaactcaaatgcagcatggattaatctctatagcagcccgcactgttattacacatctggtaaatcacctgggccattatccaatgagcggtggtcctgctatgctaacaagtcaggtgtgtgaaaatcacgacaatcattacagtgaaagtactgaactttctcctgaactctttgagagtccaaatatccagttctttgtgttaaataatacaaccttagtgtcctgtatccagatcagatcagaagagaatatgcctggaggaggtttatctgctggccttgcatcagccaattcaaatgtcagaatcatagtacgtgatctctctggaaaatattcatgggattctgctatactgtatggcccacctcctgtaagtggcttgtcagaacctacatctttcatgctttcattgtctcaccaagagaagccagaagagcctccgacatctaatgaatgcttagaagatataaccgtaaaagatggactttctctccagtttaaaagatttagagaaactgtaccaacttgggatacaataagagatgaagaagatgttcttgatgagctcttgcagtatttgggtgttactagtcctgaatgcttacagagaactggaatctcacttaatattcctgctccacaacctgtgtgcatttctgaaaaacaagaaaatgatgttattaatgctatccttaagcaacatacagaagaaaaagaatttgttgagaagcactttaatgacttaaacatgaaagctgtggaacaagatgaaccaatacctcaaaaacctcagtcagcattttattattgcagattgcttcttagtatattgggaatgaattcctgggacaaacggaggagctttcatctcctgaagaaaaatgaaaagctacttagagaacttaggaacttggattcaaggcagtgccgagagacacacaagattgcagtattttatgttgctgaaggacaagaagacaaacactccattctcaccaatacaggaggaagtcaagcatatgaagattttgtagctggtcttggttgggaggtaaatcttacaaaccattgtggttttatgggaggactacaaaaaaacaaaagcactggattgaccactccatattttgctacctctacagtagagttgagacatttgggaaatgatgaagtgcacattgtttggtcagagcatactagagactacaggagaggaattattcccacagaatttggtgatgtccttattgtaatatatccaatgaaaaatcacatgttcagtattcagataatgaaaaaaccagaggttcccttctttggtcccctttttgatggtgctattgtgaatggaaaggttctacccattatggttagagcaacagctataaatgcaagccgtgctctgaaatctctgattccattgtatcaaaacttctatgaggagagagcacgatacctgcaaacaattgtccagcaccacttagaaccaacaacatttgaagattttgcagcacaggttttttctccagctccctaccaccatttaccatctgatgccgatcattaaatatcagttctgtttatctgaagggctcctacccagagattctacccagtgaaactcccacagcaacgcaggtagatggggctgacctggcctctccaatgtctcctcgaactagcaaaagccgcatgtccatgaagctgcgtcgttcctctggctcagccaataaatcctaaggagacaagcagcccagcagtgatcagcagtagccaccttagcacgaacatagggttaaccctttcaggccttcatgtctgccataacatgcatgtttcttcctgtacatttatttgagaaaacactggatttaaataattttaaataatttgtagcttaatattaaagatttaagttatttattgtttcattttttttcccacaatccaagctgccatattttgagggcagggggagttttattctacaccctttaccttcctagataattatgtctaagtagttttatctttaatttcatggttaactgtgagccaaaatacaattggacaattagtctcattatttattgtgccccattgcaactttatggttcaataaatatataattttttacaaatgtaaaattttacatttaagcatttgtaaagttacagcaaaagatgtacctgttaatacacagaatgtgtacagattatttgttatgacaataaaacactcaaaataaatggtctttagcatctcaaattccaactgaaatcattttagtattaactcttcttcccaaagcaatgtctcatttcttggctgtgcaggtgatgccatgttatatccaataactagaaaaatcactgtgctgaacttttatgtttagcttccaagtatttttctaatgttttgcatttcaagtggtatcactgttaaatgccatttgttttcagattgtggccttttattattggctgctagatcctggtgtttctatgttcttttttaagcaccaaaaagaagatggggaagaaaagaaggaaaattttctgatataaatatgttgttcaaattatgagtattatttaaaaaagaaaaaggaacataacccaggagtctaagttaaatctaatattgttaatactgaacttgcaggtccaggttggtatacattccaccctctagaagtattttcttacagtagataagctgctcacattttgttttgaatgggcatctcctgaggaaatgtagcatgacattggtactaactgcatgtgtaaatacatcatactggcaaaccgtaaaatataaattatgtatcatcattcatgtagtatctataatttgtaacagtgggggggaaagatgacatggtatttaataatacaataaaaatattcttatcacttccta

SEQ ID NO: 99 - DNA, 7101 bp, Homo sapien
gcgggaaggtgttcgtcttttcttactatggttgcaagctcttcagaataactgtagcaaagaacagctctggatgttttcatgcttaatccctggattttcagcaccacagtctgaacatggacctcgaactttagataatctcattaatcctccactcaaccttcaagaaactcaagtcactatagaagaaatcactcctcttgtccccccacaatcaggagataaagggcaagaagatctcacaagctattttcttgaagcacttctaaaatacatagtcattcaggtaaaaagtttagaatggaagaacaaagaaaaccaagaaaggggattttcatttttgttttcacattttaagaaatattacttgccttatatttttccaaacatctgtaaggaaaacagtttatatcatcctatacttgacatcccgcagatgagaccaaagccacattatgtcgtgataaagaaagatgctgaaaccaatgaagcaatctattgtacaaaggagcctttcattaaggctcgtgttattgtcattcgttggctggtttctttctggctggagccaaaaccacatacaggacctcatattcctgggatggaaggtgaagtcttgccaaagaatattcagagagcagctgctagtttagtatccagagaagaaagcaaaaatgataatgctgataaaacagacagaactacagaacccgaacagtctcattccaatacaagcactctcacggagcgagaacctagctcatctagtctctgtagtattgatgaagaacatctcacagacattgaaatagttcgcagagttttttcttctaaaaggagtaatgtaaactttgtgacagagatatttcgtcaggcatttttattaccaatttgtgaagcagcagctatgagaaaagtggtaaaagtatatcaagaatggatccaacaagaggaaaaacctttgttcatgcaagagcctgaagaaattgtgatcacttcttcagacctcccttgcattgaaaatgtcacagaccatgatatttcaatggaagaaggagaaaaaagagaagaggaaaatgggaccaatactgctgatcatgttcgaaattccagttgggcaaaaaacggctcctaccaaggtgctcttcataacgcctctgaagaagccacagaacaaaacatacgagctggtacccaggcagttttgcaggtgtttattataaactcatcaaatatatttcttcttgaacctgcaaatgaaataaaaaatcttctggatgaacacacagatatgtgtaaacgcattcttaacatttatcggtacatggttgtacaagtatcaatggacaaaaagacttgggaacagatgctgcttgtgttgctcagagtcacggaatctgtactgaagatgccatcacaagcttttctacagttccaagggaaaaaaaatatgaccttggcaggtcgacttgcaggaccacttttccagacccttatagttgcctggatcaaagcaaacctaaatgtgtacatctcccgagaactttgggatgacttactgtcagtattgtcatcgctgacctattgggaagagttggccactgagtggtcactgactatggagacattaactaaagttttagctaggaatttatatagtttggatctcagtgatttaccattggataagctgagtgaacagaaacaaaaaaagcacaaagggaaaggagttggacatgaatttcagaaagtttcagttgacaagtcattttctagaggatggagtcgtgatcagcctggccaagccccaatgagacagaggagtgcaacaaccactggttctccaggaaccgaaaaggcgaggagtatagtacggcaaaaaactgtcgatattgatgatgctcaaatacttccccgctcaactagagtcagacatttttcacaaagtgaagaaactggaaatgaagtttttggtgctttgaatgaggagcagccattgcctcgaagtagcagcacttctgacatcttggaaccattcactgttgaacgagccaaagtcaataaagaggacatgagccaaaaactgcctcctcttaatagtgatattggcggcagcagtgctaatgttcctgatctgatggatgagtttatagcagaacgacttcgaagtggtaatgcctcgactatgacaagaagaggaagtagtccaggcagcctggaaattcccaaagacctccctgatattctaaacaagcagaaccagatgcgccctattgatgacccaggtgtgccctcagaatggacttctcctgccagtgcagggagcagtgatcttatcagctcagatagtcattcggattctttcagcgctttccaatatgatggccgaaaatttgacaattttggctttggaaccgacactggggttacgtcctctgctgatgtggattcaggttctggccatcatcagagtgctgaagagcaggaagtggctagtctaactactcttcatatagattctgaaacaagcagtcttaatcagcaagctttctctgctgaagttgcaactattactggttcagaaagtgcttccccagtccactcacctctgggctccaggtcacagactccttccccttctacattgaatatagatcacatggaacagaaggatctgcagctcgacgagaagctccaccactctgttcttcagacaccagatgatctagaaattagtgaatttccatcagaatgttgtagtgtgatggcaggaggtactctgactggatggcatgctgatgttgctactgtaatgtggcgaagaatgctaggcattttgggagatgtaaattcaatcatggatcctgaaatacatgctcaagtttttgattacctctgtgaactttggcagaatctagctaagattagagataaccttggcatttcaactgataacctgacctccccttctccaccagttttaattcctccactgagaattcttacaccttggctttttaaggcaaccatgttgactgataaatataaacaaggtaaattacatgcatataaacttatttgtaatacaatgaaaagaagacaagatgtttctccaaatagagattttctaacacatttctacaatataatgcattgtggattacttcatattgaccaggatattgtcaatacaatcatcaaacactgctcacctcaatttttttcacttggtttgcctggtgccacaatgcttattatggattttattgtagcagctggtagagtggcttcttcagcttttctcaatgcaccaagagtagaagcacaagttcttctgggatctttggtttgctttcccaacttatattgtgaactgccttctcttcatcccaacattcctgatgttgctgtgtctcagtttacagatgttaaggaacttataatcaaaactgtattaagctcggcaagagatgagccctctggtcctgcacgatgtgtagcactttgtagtttaggtatttggatttgtgaagaactagtccatgagtctcatcatcctcaaattaaggaagctctgaatgtgatttgtgtttccttaaagtttactaataaaacagtagcccacgtagcttgtaacatgcttcacatgctggttcattatgtacctagacttcagatttaccagcctgattctcccttgaaaattattcaaatcctaatagctaccatcacccatcttttaccaagtacagaggcttcatcttatgaaatggacaagaggttggtagtatctttacttctctgccttctggactggatcatggccttacctctaaagacactgctccaaccatttcatgctacgggagcagaaagcgataaaacagaaaaatctgttctcaattgcatttataaggttttacatgggtgtgtttatggagctcagtgttttagcaatccaaggtattttcccatgagcctctctgatttggcatctgtagattatgatccttttatgcatttggaaagtctgaaagagcctgagcctctgcactctcctgactcagaacgatcttctaaactccagccagtaacagaagtgaaaactcaaatgcagcatggattaatctctatagcagcccgcactgttattacacatctggtaaatcacctgggccattatccaatgagcggtggtcctgctatgctaacaagtcaggtgtgtgaaaatcacgacaatcattacagtgaaagtactgaactttctcctgaactctttgagagtccaaatatccagttctttgtgttaaataatacaaccttagtgtcctgtatccagatcagatcagaagagaatatgcctggaggaggtttatctgctggccttgcatcagccaattcaaatgtcagaatcatagtacgtgatctctctggaaaatattcatgggattctgctatactgtatggcccacctcctgtaagtggcttgtcagaacctacatctttcatgctttcattgtctcaccaagagaagccagaagagcctccgacatctaatgaatgcttagaagatataaccgtaaaagatggactttctctccagtttaaaagatttagagaaactgtaccaacttgggatacaataagagatgaagaagatgttcttgatgagctcttgcagtatttgggtgttactagtcctgaatgcttacagagaactggaatctcacttaatattcctgctccacaacctgtgtgcatttctgaaaaacaagaaaatgatgttattaatgctatccttaagcaacatacagaagaaaaagaatttgttgagaagcactttaatgacttaaacatgaaagctgtggaacaagatgaaccaatacctcaaaaacctcagtcagcattttattattgcagattgcttcttagtatattgggaatgaattcctgggacaaacggaggagctttcatctcctgaagaaaaatgaaaagctacttagagaacttaggaacttggattcaaggcagtgccgagagacacacaagattgcagtattttatgttgctgaaggacaagaagacaaacactccattctcaccaatacaggaggaagtcaagcatatgaagattttgtagctggtcttggttgggaggtaaatcttacaaaccattgtggttttatgggaggactacaaaaaaacaaaagcactggattgaccactccatattttgctacctctacagtagaggtaatatttcacgtgtcaacaagaatgccttctgattctgatgattctttgaccaaaaaattgagacatttgggaaatgatgaagtgcacattgtttggtcagagcatactagagactacaggagaggaattattcccacagaatttggtgatgtccttattgtaatatatccaatgaaaaatcacatgttcagtattcagataatgaaaaaaccagaggttcccttctttggtcccctttttgatggtgctattgtgaatggaaaggttctacccattatggttagagcaacagctataaatgcaagccgtgctctgaaatctctgattccattgtatcaaaacttgaggagagagcacgatatcttcaaatgttgttggttctaagtggtgctggacaattgtttgcaggtatcgtgctctcaccacttagaaccaacaacatttgaagattttgcagcacaggttttttctccagctccctaccaccatttaccatctgatgccgggctcctacccagagattctacccagtgaaactcccacagcaacgcaggtagatggggctgacctggcctctccaatgtctcctcgaactagcaaaagccgcatgtccatgaagctgcgtcgttcctctggctcagccaataaatcctaaggagacaagcagcccagcagtgatcagcagtagccaccttagcacgaacatagggttaaccctttcaggccttcatgtctgccataacatgcatgtttcttcctgtacatttatttgagaaaacactggatttaaataattttaaataatttgtagcttaatattaaagatttaagttatttattgtttcattttttttcccacaatccaagctgccatattttgagggcagggggagttttattctacaccctttaccttcctagataattatgtctaagtagttttatctttaatttcatggttaactgtgagccaaaatacaattggacaattagtctcattatttattgtgccccattgcaactttatggttcaataaatatataattttttacaaatgtaaaattttacatttaagcatttgtaaagttacagcaaaagatgtacctgttaatacacagaatgtgtacagattatttgttatgacaataaaacactcaaaataaatggtctttagcatctcaaattccaactgaaatcattttagtattaactcttcttcccaaagcaatgtctcatttcttggctgtgcaggtgatgccatgttatatccaataactagaaaaatcactgtgctgaacttttatgtttagcttccaagtatttttctaatgttttgcatttcaagtggtatcactgttaaatgccatttgttttcagattgtggccttttattattggctgctagatcctggtgtttctatgttcttttttaagcaccaaaaagaagatggggaagaaaagaaggaaaattttctgatataaatatgttgttcaaattatgagtattatttaaaaaagaaaaaggaacataacccaggagtctaagttaaatctaatattgttaatactgaacttgcaggtccaggttggtatacattccaccctctagaagtattttcttacagtagataagctgctcacattttgttttgaatgggcatctcctgaggaaatgtagcatgacattggtactaactgcatgtgtaaatacatcatactggcaaaccgtaaaatataaattatgtatcatcattcatgtagtatctataatttgtaacagtgggggggaaagatgacatggtatttaataatacaataaaaatattcttatcacttccta

SEQ ID NO: 100 - DNA, 5753 bp, Homo sapien
gcgggaaggtgttcgtcttttcttactatggttgcaagctcttcagaataactgtagcaaagaacagctctggatgttttcatgcttaatccctggattttcagcaccacagtctgaacatggacctcgaactttagataatctcattaatcctccactcaaccttcaagaaactcaagtcactatagaagaaatcactcctcttgtccccccacaatcaggagataaagggcaagaagatctcacaagctattttcttgaagcacttctaaaatacatagtcattcaggtaaaaagtttagaatggaagaacaaagaaaaccaagaaaggggattttcatttttgttttcacattttaagaaatattacttgccttatatttttccaaacatctgtaaggaaaacagtttatatcatcctatacttgacatcccgcagatgagaccaaagccacattatgtcgtgataaagaaagatgctgaaaccaatgaagcaatctattgtacaaaggagcctttcattaaggctcgtgttattgtcattcgttggctggtttctttctggctggagccaaaaccacatacaggacctcatattcctgggatggaaggtgaagtcttgccaaagaatattcagagagcagctgctagtttagtatccagagaagaaagcaaaaatgataatgctgataaaacagacagaactacagaacccgaacagtctcattccaatacaagcactctcacggagcgagaacctagctcatctagtctctgtagtattgatgaagaacatctcacagacattgaaatagttcgcagagttttttcttctaaaaggagtaatgtaaactttgtgacagagatatttcgtcaggcatttttattaccaatttgtgaagcagcagctatgagaaaagtggtaaaagtatatcaagaatggatccaacaagaggaaaaacctttgttcatgcaagagcctgaagaaattgtgatcacttcttcagacctcccttgcattgaaaatgtcacagaccatgatatttcaatggaagaaggagaaaaaagagaagaggaaaatgggaccaatactgctgatcatgttcgaaattccagttgggcaaaaaacggctcctaccaaggtgctcttcataacgcctctgaagaagccacagaacaaaacatacgagctggtacccaggcagttttgcaggtgtttattataaactcatcaaatatatttcttcttgaacctgcaaatgaaataaaaaatcttctggatgaacacacagatatgtgtaaacgcattcttaacatttatcggtacatggttgtacaagtatcaatggacaaaaagacttgggaacagatgctgcttgtgttgctcagagtcacggaatctgtactgaagatgccatcacaagcttttctacagttccaagggaaaaaaaatatgaccttggcaggtcgacttgcaggaccacttttccagacccttatagttgcctggatcaaagcaaacctaaatgtgtacatctcccgagaactttgggatgacttactgtcagtattgtcatcgctgacctattgggaagagttggccactgagtggtcactgactatggagacattaactaaagttttagctaggaatttatatagtttggatctcagtgatttaccattggataagctgagtgaacagaaacaaaaaaagcacaaagggaaaggagttggacatgaatttcagaaagtttcagttgacaagtcattttctagaggatggagtcgtgatcagcctggccaagccccaatgagacagaggagtgcaacaaccactggttctccaggaaccgaaaaggcgaggagtatagtacggcaaaaaactgtcgatattgatgatgctcaaatacttccccgctcaactagagtcagacatttttcacaaagtgaagaaactggaaatgaagtttttggtgctttgaatgaggagcagccattgcctcgaagtagcagcacttctgacatcttggaaccattcactgttgaacgagccaaagtcaataaagaggacatgagccaaaaactgcctcctcttaatagtgatattggcggcagcagtgctaatgttcctgatctgatggatgagtttatagcagaacgacttcgaagtggtaatgcctcgactatgacaagaagaggaagtagtccaggcagcctggaaattcccaaagacctccctgatattctaaacaagcagaaccagatgcgccctattgatgacccaggtgtgccctcagaatggacttctcctgccagtgcagggagcagtgatcttatcagctcagatagtcattcggattctttcagcgctttccaatatgatggccgaaaatttgacaattttggctttggaaccgacactggggttacgtcctctgctgatgtggattcaggttctggccatcatcagagtgctgaagagcaggaagtggctagtctaactactcttcatatagattctgaaacaagcagtcttaatcagcaagctttctctgctgaagttgcaactattactggttcagaaagtgcttccccagtccactcacctctgggctccaggtcacagactccttccccttctacattgaatatagatcacatggaacagaaggatctgcagctcgacgagaagctccaccactctgttcttcagacaccagatgatctagaaattagtgaatttccatcagaatgttgtagtgtgatggcaggaggtactctgactggatggcatgctgatgttgctactgtaatgtggcgaagaatgctaggcattttgggagatgtaaattcaatcatggatcctgaaatacatgctcaagtttttgattacctctgtgaactttggcagaatctagctaagattagagataaccttggcatttcaactgataacctgacctccccttctccaccagttttaattcctccactgagaattcttacaccttggctttttaaggcaaccatgttgactgataaatataaacaaggtaaattacatgcatataaacttatttgtaatacaatgaaaagaagacaagatgtttctccaaatagagattttctaacacatttctacaatataatgcattgtggattacttcatattgaccaggatattgtcaatacaatcatcaaacactgctcacctcaatttttttcacttggtttgcctggtgccacaatgcttattatggattttattgtagcagctggtagagtggcttcttcagcttttctcaatgcaccaagagtagaagcacaagttcttctgggatctttggtttgctttcccaacttatattgtgaactgccttctcttcatcccaacattcctgatgttgctgtgtctcagtttacagatgttaaggaacttataatcaaaactgtattaagctcggcaagagatgagccctctggtcctgcacgatgtgtagcactttgtagtttaggtatttggatttgtgaagaactagtccatgagtctcatcatcctcaaattaaggaagctctgaatgtgatttgtgtttccttaaagtttactaataaaacagtagcccacgtagcttgtaacatgcttcacatgctggttcattatgtacctagacttcagatttaccagcctgattctcccttgaaaattattcaaatcctaatagctaccatcacccatcttttaccaagtacagaggcttcatcttatgaaatggacaagaggttggtagtatctttacttctctgccttctggactggatcatggccttacctctaaagacactgctccaaccatttcatgctacgggagcagaaagcgataaaacagaaaaatctgttctcaattgcatttataaggttttacatgggtgtgtttatggagctcagtgttttagcaatccaaggtattttcccatgagcctctctgatttggcatctgtagattatgatccttttatgcatttggaaagtctgaaagagcctgagcctctgcactctcctgactcagaacgatcttctaaactccagccagtaacagaagtgaaaactcaaatgcagcatggattaatctctatagcagcccgcactgttattacacatctggtaaatcacctgggccattatccaatgagcggtggtcctgctatgctaacaagtcaggtgtgtgaaaatcacgacaatcattacagtgaaagtactgaactttctcctgaactctttgagagtccaaatatccagttctttgtgttaaataatacaaccttagtgtcctgtatccagatcagatcagaagagaatatgcctggaggaggtttatctgctggccttgcatcagccaattcaaatgtcagaatcatagtacgtgatctctctggaaaatattcatgggattctgctatactgtatggcccacctcctgtaagtggcttgtcagaacctacatctttcatgctttcattgtctcaccaagagaagccagaagagcctccgacatctaatgaatgcttagaagatataaccgtaaaagatggactttctctccagtttaaaagatttagagaaactgtaccaacttgggatacaataagagatgaagaagatgttcttgatgagctcttgcagtatttgggtgttactagtcctgaatgcttacagagaactggaatctcacttaatattcctgctccacaacctgtgtgcatttctgaaaaacaagaaaatgatgttattaatgctatccttaagcaacatacagaagaaaaagaatttgttgagaagcactttaatgacttaaacatgaaagctgtggaacaagatgaaccaatacctcaaaaacctcagtcagcattttattattgcagattgcttcttagtatattgggaatgaattcctgggacaaacggaggagctttcatctcctgaagaaaaatgaaaagctacttagagaacttaggaacttggattcaaggcagtgccgagagacacacaagattgcagtattttatgttgctgaaggacaagaagacaaacactccattctcaccaatacaggaggaagtcaagcatatgaagattttgtagctggtcttggttgggaggtaaatcttacaaaccattgtggttttatgggaggactacaaaaaaacaaaagcactggattgaccactccatattttgctacctctacagtagaggtaatatttcacgtgtcaacaagaatgccttctgattctgatgattctttgaccaaaaaattgagacatttgggaaatgatgaagtgcacattgtttggtcagagcatactagagactacaggagaggaattattcccacagaatttggtgatgtccttattgtaatatatccaatgaaaaatcacatgttcagtattcagataatgaaaaaaccagaggttcccttctttggtcccctttttgatggtgctattgtgaatggaaaggttctacccattatggttagagcaacagctataaatgcaagccgtgctctgaaatctctgattccattgtatcaaaactttttattctccctcaagctctgctactcaaatgtccagtacctgttgcaaagtaggaaagccaaaactaagtggaatggaattgatgaattgattggttctgctaatgcagttgcctttcgttataataaaacattataaaaccttttgg

SEQ ID NO: 101 - DNA, 2657 bp, Homo sapien
gcgggaaggtgttcgtcttttcttactatggttgcaagctcttcagaataactgtagcaaagaacagctctggatgttttcatgcttaatccctggattttcagcaccacagtctgaacatggacctcgaactttagataatctcattaatcctccactcaaccttcaagaaactcaagtcactatagaagaaatcactcctcttgtccccccacaatcaggagataaagggcaagaagatctcacaagctattttcttgaagcacttctaaaatacatagtcattcaggtaaaaagtttagaatggaagaacaaagaaaaccaagaaaggggattttcatttttgttttcacattttaagaaatattacttgccttatatttttccaaacatctgtaaggaaaacagtttatatcatcctatacttgacatcccgcagatgagaccaaagccacattatgtcgtgataaagaaagatgctgaaaccaatgaagcaatctattgtacaaaggagcctttcattaaggctcgtgttattgtcattcgttggctggtttctttctggctggagccaaaaccacatacaggacctcatattcctgggatggaaggtgaagtcttgccaaagaatattcagagagcagctgctagtttagtatccagagaagaaagcaaaaatgataatgctgataaaacagacagaactacagaacccgaacagtctcattccaatacaagcactctcacggagcgagaacctagctcatctagtctctgtagtattgatgaagaacatctcacagacattgaaatagttcgcagagttttttcttctaaaaggagtaatgtaaactttgtgacagagatatttcgtcaggcatttttattaccaatttgtgaagcagcagctatgagaaaagtggtaaaagtatatcaagaatggatccaacaagaggaaaaacctttgttcatgcaagagcctgaagaaattgtgatcacttcttcagacctcccttgcattgaaaatgtcacagaccatgatatttcaatggaagaaggagaaaaaagagaagaggaaaatgggaccaatactgctgatcatgttcgaaattccagttgggcaaaaaacggctcctaccaaggtgctcttcataacgcctctgaagaagccacagaacaaaacatacgagctggtacccaggcagttttgcaggtgtttattataaactcatcaaatatatttcttcttgaacctgcaaatgaaataaaaaatcttctggatgaacacacagatatgtgtaaacgcattcttaacatttatcggtacatggttgtacaagtatcaatggacaaaaagacttgggaacagatgctgcttgtgttgctcagagtcacggaatctgtactgaagatgccatcacaagcttttctacagttccaagggaaaaaaaatatgaccttggcaggtcgacttgcaggaccacttttccagacccttatagttgcctggatcaaagcaaacctaaatgtgtacatctcccgagaactttgggatgacttactgtcagtattgtcatcgctgacctattgggaagagttggccactgagtggtcactgactatggagacattaactaaagttttagctaggaatttatatagtttggatctcagtgatttaccattggataagctgagtgaacagaaacaaaaaaagcacaaagggaaaggagttggacatgaatttcagaaagtttcagttgacaagtcattttctagaggatggagtcgtgatcagcctggccaagccccaatgagacagaggagtgcaacaaccactggttctccaggaaccgaaaaggcgaggagtatagtacggcaaaaaactgtcgatattgatgatgctcaaatacttccccgctcaactagagtcagacatttttcacaaagtgaagaaactggaaatgaagtttttggtgctttgaatgaggagcagccattgcctcgaagtagcagcacttctgacatcttggaaccattcactgttgaacgagccaaaggtgcagttcctgtcattgacagttcatcccgtcatgcaccaagcttgcagagttccacagaggcttcttcaataactagatccactgaaagccacatcactgatactcatagtagagagtcttctctggaagttggtgatagcatatatgaccatctttgtcatttaataggtccagtagaacttgcagattcagcttttgaacaaatccagtacattgaccttgaaggagatgatgatcttctttccaccctgaaagaatattttaaggaaaaccaggaaaatcatagtaaaaatgagacagggaaagacccagcttctcaggaagtgactattgcagtaaataggggtgaaagattatccttagataaattagaatgcacagatcaggaaactgaatcagaaaatatcacctcttttgttgggactcctgaaaacctacagtttcagaaagaaccaaactcagctgtcttcatgagtaatatcgcacctaaccagtcagacagtttttttagaacacaaacttctgaaaaatctaagcaactaaacactgataaacagccatcagagcctagtttagatagcccttgtgataaag

SEQ ID NO: 102 - DNA, 1394 bp, Homo sapien
gcgggaaggtgttcgtcttttcttactatggttgcaagctcttcagaataactgtagcaaagaacagctctggatgttttcatgcttaatccctggattttcagcaccacagtctgaacatggacctcgaactttagataatctcattaatcctccactcaaccttcaagaaactcaagtcactatagaagaaatcactcctcttgtccccccacaatcaggagataaagggcaagaagatctcacaagctattttcttgaagcacttctaaaatacatagtcattcaggtaaaaagtttagaatggaagaacaaagaaaaccaagaaaggggattttcatttttgttttcacattttaagaaatattacttgccttatatttttccaaacatctgtaaggaaaacagtttatatcatcctatacttgacatcccgcagatgagaccaaagccacattatgtcgtgataaagaaagatgctgaaaccaatgaagcaatctattgtacaaaggagcctttcattaaggctcgtgttattgtcattcgttggctggtttctttctggctggagccaaaaccacatacaggacctcatattcctgggatggaaggtgaagtcttgccaaagaatattcagagagcagctgctagtttagtatccagagaagaaagcaaaaatgataatgctgataaaacagacagaactacagaacccgaacagtctcattccaatacaagcactctcacggagcgagaacctagctcatctagtctctgtagtattgatgaagaacatctcacagacattgaaatagttcgcagagttttttcttctaaaaggagtaatgtaaactttgtgacagagatatttcgtcaggcatttttattaccaatttgtgaagcagcagctatgagaaaagtggtaaaagtatatcaagaatggatccaacaagaggaaaaacctttgttcatgcaagagcctgaagaaattgtgatcacttcttcagacctcccttgcattgaaaatgtcacagaccatgatatttcaatggaagaaggagaaaaaagagaagaggaaaatgggaccaatactgctgatcatgttcgaaattccagttgggcaaaaaacggctcctaccaaggtgctcttcataacgcctctgaagaagccacagaacaaaacatacgagctggtacccaggcagttttgcaggtgtttattataaactcatcaaatatatttcttcttgaacctgcaaatgaaataaaaaatcttctggatgaacacacagatatgtgtaaacgcattcttaacatttatcggtacatggttgtacaagtatcaatggacaaaaagacttggtaaaaaaatttttatcctttatgtctatgtg

SEQ ID NO: 103 - DNA, 1324 bp, Homo sapien
gcgggaaggtgttcgtcttttcttactatggttgcaagctcttcagaataactgtagcaaagaacagctctggatgttttcatgcttaatccctggattttcagcaccacagtctgaacatggacctcgaactttagataatctcattaatcctccactcaaccttcaagaaactcaagtcactatagaagaaatcactcctcttgtccccccacaatcaggagataaagggcaagaagatctcacaagctattttcttgaagcacttctaaaatacatagtcattcaggtaaaaagtttagaatggaagaacaaagaaaaccaagaaaggggattttcatttttgttttcacattttaagaaatattacttgccttatatttttccaaacatctgtaaggaaaacagtttatatcatcctatacttgacatcccgcagatgagaccaaagccacattatgtcgtgataaagaaagatgctgaaaccaatgaagcaatctattgtacaaaggagcctttcattaaggctcgtgttattgtcattcgttggctggtttctttctggctggagccaaaaccacatacaggacctcatattcctgggatggaaggtgaagtcttgccaaagaatattcagagagcagctgctagtttagtatccagagaagaaagcaaaaatgataatgctgataaaacagacagaactacagaacccgaacagtctcattccaatacaagcactctcacggagcgagaacctagctcatctagtctctgtagtattgatgaagaacatctcacagacattgaaatagttcgcagagttttttcttctaaaaggagtaatgtaaactttgtgacagagatatttcgtcaggcatttttattaccaatttgtgaagcagcagctatgagaaaagtggtaaaagtatatcaagaatggatccaacaagaggaaaaacctttgttcatgcaagagcctgaagaaattgtgatcacttcttcagacctcccttgcattgaaaatgtcacagaccatgatatttcaatggaagaaggagaaaaaagagaagaggaaaatgggaccaatactgctgatcatgttcgaaattccagttgggcaaaaaacggctcctaccaaggtgctcttcataacgcctctgaagaagccacagaacaaaacatacgagctggtacccaggcagttttgcaggtggatcactttatggctatttttaaaaataaaataatcattaaatatttctgttcagtatttcagtatacagtatacttttcacaatataataaattcaccacctatatt

SEQ ID NO: 104 - DNA, 678 bp, Homo sapien
tgctggaaagtggaaaggggcccagaattcaaagcaggagggcattgaacattgccagctttgtttgagaatcgtttcaatgtgacgttttgtgtcttgagagcctaagaaatgctccattggcagggattgggtcccgtctagcccagtattctgtctctgacaatgggcacccatttgtggaagcattcttcatgctggcggccctgtgggctttgtgatatgccccagatctctggcttcctataatagtccacgggggatgtgttatccaggaatttttaaaaccctccttgaacctattcatatgtgccagctcttagggtgacagattccagaagtcagcaaatatttgaacgcttagtttatggctagcactgtgctaagcattgtcgaagatagaaatgatgcttcataactggtcttggctcttgcttgagcttattcttttttaaggagacaagacttggttgcagttgtggaaaaggtgggcagtgacatcagatgtcacctttagaacaccaggcagaccatgagtggatcagactcacagtgacagagctcacagagactaatgtctaaaaacagaaacatattattaataatttatgttgaaaaataaaactaccagacccaacactgatttatccccatatgcaagtctaatagccaaatcgt

SEQ ID NO: 105 - DNA, 675 bp, Homo sapien
tctccttggaaaggggcccagaattcaaagcaggagggcattgaacattgccagctttgtttgagaatcgtttcaatgtgacgttttgtgtcttgagagcctaagaaatgctccattggcagggattggggtcccgtctagcccagtattctgtctctgacaatgggcacccatttgtggaagcattcttcatgctggcggccctgtgggctttgtgatatgccccagatctctggcttcctataatagtccacgggggatgtgttatccaggaatttttaaaaccctccttgaacctattcatatgtgccagctcttagggtgacagattccagaagtcagcaaatatttgaacgcttagtttatggctagcactgtgctaagcattgtcgaagatagaaatgatgcttcataactggtcttggctcttgcttgagcttattcttttttaaggagacaagacttggttgcagttgtggaaaaggtgggcagtgacatcagatgtcacctttagaacaccaggcagaccatgagtggatcagactcacagtgacagagctcacagagactaatgtctaaaaacagaaacatattattaataatttatgttgaaaaataaaactaccagacccaacactgatttatccccatatgcaagtctaatagccaaatcgt

SEQ ID NO: 106 - DNA, 1450 bp, Homo sapien
gattcattttaagcaacgggcggcctccgcctccattgaaggcggggaaataccgcggcgcggacggtagttgctgtggtttccgttctgagctcgcagcttaggagctgaagatcgcggacttagcgttgccgcgtccgagtccggccatcagtggctgcagatccggaggccaggagctcaaccacccttcttcggaacagggccggcctgctgctgtgccctcgacgctcggtgcctgtatctactccggggcctaggtcggctccgggggcggcttaggagaaggccgccggcgagatgttcaaaaacacgttccagagcggcttcctctccatcctctacagcatcggcagcaagcctctgcaaatctgggacaaaaaggtacggaatggccacatcaaaagaatcactgataatgacatccagtccctggtgctagagattgaagggacaaatgtaagcaccacatatatcacatgccctgcagaccccaagaagacgctgggaattaaacttcctttccttgtcatgattatcaaaaacctgaagaagtattttaccttcgaagtgcaggtactagatgacaagaatgtgcgtcgtcgctttcgggcaagtaactaccagagcaccacccgggtcaaacccttcatctgcaccatgcccatgcggctggatgacggctggaaccagattcagttcaacttgctagacttcacacggcgagcatacggcaccaattacatcgagaccctcagagtgcagaatccatccctaagacaagccaaggagatgccggagatgacgcgtttccagtcctggaagagggcctctagaagattcaggaaaagggggagaacagtcacatttcgcctctcaaaagaagcattgccttgacagaatccatgcaaattgtcgcatccgacgggtttacttctcagacagactctactcagaagatgagctgccggcagagttcaaactgtatctcccagttcagaacaaggcaaagcaataactggaattgtgactcgagggatagacccctggatgtgactcttctttttaaaaggaaactatgtggaggacgatgcaaaaacatatttatcttagtttgctctgctgtagttctgttatttatacttggtgttgcttgtcatggacaccggtgaacatgccgtaactctgtgactgcattgtaagtgcagtgggggtaagcagtcctgtgagtggcgcatgaacgctggagcttattccgccgcctgccccagtgtggggggagatacctttaccatgaacttacagaattaaagatggcccataaggaattccagaccaatatttcttcctgcggtttattctatgttttatatattatctaaatatatgtatatgctgtgtcatactcataatctggaaatgaataaagtgatatattcctggtttgtaa

SEQ ID NO: 107 - DNA, 1301 bp, Homo sapien
  misc_feature (119)..(119): n=a,c,g or t
aggaagcttaggtaagcagcaatactgtgcggactctacgcgttgcacgtgatgctagagtgacggatgatccaagtaggctgtagacttacggaggatccatgggatctactgacctnagctcgcttctgtcagtgcataccagcggaactgagacatagatgcgctgtgcgcgctcagcaggacgtcggtgctgcgcataggtaatcttcacatcactgggagtccttaggtcgtcgatccagtgggggatcgtatctaacgaggaaggccgaccggagcatcatgtactaaaattacgctcccaacacggcttcctctccatcctctacagcatcggcagcaagcctctgcaaatctgggacaaaaaggtacggaatggccacatcaaaagaatcactgataatgacatccagtccctggtgctagagattgaagggacaaatgtaagcaccacatatatcacatgccctgcagaccccaagaagacgctgggaattaaacttcctttccttgtcatgattatcaaaaacctgaagaagtattttaccttcgaagtgcaggtactagatgacaagaatgtgcgtcgtcgctttcgggcaagtaactaccagagcaccacccgggtcaaacccttcatctgcaccatgcccatgcggctggatgacggctggaaccagattcagttcaacttgctagacttcacacggcgagcatacggcaccaattacatcgagaccctcagagtgcagatccatgcaaattgtcgcatccgacgggtttacttctcagacagactctactcagaagatgagctgccggcagagttcaaactgtatctcccagttcagaacaaggcaaagcaataactggaattgtgactcgagggatagacccctggatgtgactcttctttttaaaaggaaactatgtggaggacgatgcaaaaacatatttatcttagtttgctctgctgtagttctgttatttatacttggtgttgcttgtcatggacaccggtgaacatgccgtaactctgtgactgcattgtaagtgcagtgggggtaagcagtcctgtgagtggcgcatgaacgctggagcttattccgccgcctgccccagtgtggggggagatacctttaccatgaacttacagaattaaagatggcccataaggaattccagaccaatatttcttcctgcggtttattctatgttttatatattatctaaatatatgtatatgctgtgtcatactcataatctggaaatgaataaagtgatatattcctggtttgtaa

SEQ ID NO: 108 - DNA, 1146 bp, Homo sapien
gattcattttaagcaacgggcggcctccgcctccattgaaggcggggaaataccgcggcgcggacggtagttgctgtggtttccgttctgagctcgcagcttaggagctgaagatcgcggacttagcgttgccgcgtccgagtccggccatcagtggctgcagatccggaggccaggagctcaaccacccttcttcggaacagggccggcctgctgctgtgccctcgacgctcggtgcctgtatctactccggggcctaggtcggctccgggggcggcttaggagaaggccgccggcgagatgttcaaaaacacgttccagagcggcttcctctccatcctctacagcatcggcagcaagcctctgcaaatctgggacaaaaaggtacggaatggccacatcaaaagaatcactgataatgacatccagtccctggtgctagagattgaagggacaaatgtaagcaccacatatatcacatgccctgcagaccccaagaagacgctgggaattaaacttcctttccttgtcatgattatcaaaaacctgaagaagtattttaccttcgaagtgcaggtactagatgacaagaatgtgcgtcgtcgctttcgggcaagtaactaccagagcaccacccgggtcaaacccttcatctgcaccatgcccatgcggctggatgacggctggaaccagattcagttcaacttgctagacttcacacggcgagcatacggcaccaattacatcgagaccctcagagtgcagatccatgcaaattgtcgcatccgacgggtttacttctcagacagactctactcagaagatgagctgccggcagagttcaaactgtatctcccagttcagaacaaggcaaaggtaagccagtcttccccagaggaaggtccaccagtgagtggggggagctgtgttcctggaaggtgctctggtctaagaattcagctgcagagcctctctgtgttgacactttggggtgcctttatatcgcaagatcttaggtctccttccagcactgaatcaggaatgctcctgtgaaatactctgttactgctgtttcccctctccacggtgagaggggatgaggcacttcctactactggctcacagaacttcagaaaatatcttaac

SEQ ID NO: 109 - DNA, 588 bp, Homo sapien
gcggccgcctactagtactaaattcgcggccgcgtcgacatccatgcaaattgtcgcatccgacgggtttacttctcagacagactctactcagaagatgagctgccggcagagttcaaactgtatctcccagttcagaacaaggcaaagcaataactggaattgtgactcgagggatagacccctggatgtgactcttctttttaaaaggaaactatgtggaggacgatgcaaaaacatatttatcttagtttgctctgctgtagttctgttatttatacttggtgttgcttgtcatggacaccggtgaacatgccgtaactctgtgactgcattgtaagtgcagtgggggtaagcagtcctgtgagtggcgcatgaacgctggagcttattccgccgcctgccccagtgtggggggagatacctttaccatgaacttacagaattaaagatggcccataaggaattccagaccaatatttcttcctgcggtttattctatgttttatatattatctaaatatatgtatatgctgtgtcatactcataatctggaaatgaataaagtgatatattcctggtttgtaa

SEQ ID NO: 110 - DNA, 1663 bp, Homo sapien
gattcattttaagcaacgggcggcctccgcctccattgaaggcggggaaataccgcggcgcggacggtagttgctgtggtttccgttctgagctcgcagcttaggagctgaagatcgcggacttagcgttgccgcgtccgagtccggccatcagtggctgcagatccggaggccaggagctcaaccacccttcttcggaacagggccggcctgctgctgtgccctcgacgctcggtgcctgtatctactccggggcctaggtcggctccgggggcggcttaggagaaggccgccggcgagatgttcaaaaacacgttccagagcggcttcctctccatcctctacagcatcggcagcaagcctctgcaaatctgggacaaaaaggtacggaatggccacatcaaaagaatcactgataatgacatccagtccctggtgctagagattgaagggacaaatgtaagcaccacatatatcacatgccctgcagaccccaagaagacgctgggaattaaacttcctttccttgtcatgattatcaaaaacctgaagaagtattttaccttcgaagtgcaggtactagatgacaagaatgtgcgtcgtcgctttcgggcaagtaactaccagagcaccacccgggtcaaacccttcatctgcaccatgcccatgcggctggatgacggctggaaccagattcagttcaacttgctagacttcacacggcgagcatacggcaccaattacatcgagaccctcagagtgcaggtactgctcctttcccagatagagccctgggttggggatagggcacactgcgtctaatattggcttgtggcccacatagcagaacagtgtgggtttctggcttcagttgccacactgtccagggagctttggcctcacaaaggtccaggaaatattcagaagtcgggtcaggtatagaggtgaatacagcaagtaagacctccctcttgccagaatccatccctaagacaagccaaggagatgccggagatgacgcgtttccagtcctggaagagggcctctagaagattcaggaaaagggggagaacagtcacatttcgcctctcaaaagaagcattgccttgacagaatccatgcaaattgtcgcatccgacgggtttacttctcagacagactctactcagaagatgagctgccggcagagttcaaactgtatctcccagttcagaacaaggcaaagcaataactggaattgtgactcgagggatagacccctggatgtgactcttctttttaaaaggaaactatgtggaggacgatgcaaaaacatatttatcttagtttgctctgctgtagttctgttatttatacttggtgttgcttgtcatggacaccggtgaacatgccgtaactctgtgactgcattgtaagtgcagtgggggtaagcagtcctgtgagtggcgcatgaacgctggagcttattccgccgcctgccccagtgtggggggagatacctttaccatgaacttacagaattaaagatggcccataaggaattccagaccaatatttcttcctgcggtttattctatgttttatatattatctaaatatatgtatatgctgtgtcatactcataatctggaaatgaataaagtgatatattcctggtttgtaa

SEQ ID NO: 111 - DNA, 1566 bp, Homo sapien
gattcattttaagcaacgggcggcctccgcctccattgaaggcggggaaataccgcggcgcggacggtagttgctgtggtttccgttctgagctcgcagcttaggagctgaagatcgcggacttagcgttgccgcgtccgagtccggccatcagtggctgcagatccggaggccaggagctcaaccacccttcttcggaacagggccggcctgctgctgtgccctcgacgctcggtgcctgtatctactccggggcctaggtcggctccgggggcggcttaggagaaggccgccggcgagatgttcaaaaacacgttccagagcggcttcctctccatcctctacagcatcggcagcaagcctctgcaaatctgggacaaaaaggtacggaatggccacatcaaaagaatcactgataatgacatccagtccctggtgctagagattgaagggacaaatgtaagcaccacatatatcacatgccctgcagaccccaagaagacgctgggaattaaacttcctttccttgtcatgattatcaaaaacctgaagaagtattttaccttcgaagtgcaggtactagatgacaagaatgtgcgtcgtcgctttcgggcaagtaactaccagagcaccacccgggtcaaacccttcatctgcaccatgcccatgcggctggatgacggctggaaccagattcagttcaacttgctagacttcacacggcgagcatacggcaccaattacatcgagaccctcagagtgcaggtactgctcctttcccagatagagccctgggttggggatagggcacactgcgtctaatattggcttgtggcccacatagcagaacagtgtgggtttctggcttcagttgccacactgtccagggagctttggcctcacaaaggtccaggaaatattcagaagtcgggtcaggtatagaggtgaatacagcaagtaagacctccctcttgccagaatccatccctaagacaaaagaagcattgccttgacagaatccatgcaaattgtcgcatccgacgggtttacttctcagacagactctactcagaagatgagctgccggcagagttcaaactgtatctcccagttcagaacaaggcaaagcaataactggaattgtgactcgagggatagacccctggatgtgactcttctttttaaaaggaaactatgtggaggacgatgcaaaaacatatttatcttagtttgctctgctgtagttctgttatttatacttggtgttgcttgtcatggacaccggtgaacatgccgtaactctgtgactgcattgtaagtgcagtgggggtaagcagtcctgtgagtggcgcatgaacgctggagcttattccgccgcctgccccagtgtggggggagatacctttaccatgaacttacagaattaaagatggcccataaggaattccagaccaatatttcttcctgcggtttattctatgttttatatattatctaaatatatgtatatgctgtgtcatactcataatctggaaatgaataaagtgatatattcctggtttgtaa

SEQ ID NO: 112 - DNA, 1156 bp, Homo sapien
gattcattttaagcaacgggcggcctccgcctccattgaaggcggggaaataccgcggcgcggacggtagttgctgtggtttccgttctgagctcgcagcttaggagctgaagatcgcggacttagcgttgccgcgtccgagtccggccatcagtggctgcagatccggaggccaggagctcaaccacccttcttcggaacagggccggcctgctgctgtgccctcgacgctcggtgcctgtatctactccggggcctaggtcggctccgggggcggcttaggagaaggccgccggcgagatgttcaaaaacacgttccagagcggcttcctctccatcctctacagcatcggcagcaagcctctgcaaatctgggacaaaaaggtacggaatggccacatcaaaagaatcactgatagtactagatgacaagaatgtgcgtcgtcgctttcgggcaagtaactaccagagcaccacccgggtcaaacccttcatctgcaccatgcccatgcggctggatgacggctggaaccagattcagttcaacttgctagacttcacacggcgagcatacggcaccaattacatcgagaccctcagagtgcagatccatgcaaattgtcgcatccgacgggtttacttctcagacagactctactcagaagatgagctgccggcagagttcaaactgtatctcccagttcagaacaaggcaaagcaataactggaattgtgactcgagggatagacccctggatgtgactcttctttttaaaaggaaactatgtggaggacgatgcaaaaacatatttatcttagtttgctctgctgtagttctgttatttatacttggtgttgcttgtcatggacaccggtgaacatgccgtaactctgtgactgcattgtaagtgcagtgggggtaagcagtcctgtgagtggcgcatgaacgctggagcttattccgccgcctgccccagtgtggggggagatacctttaccatgaacttacagaattaaagatggcccataaggaattccagaccaatatttcttcctgcggtttattctatgttttatatattatctaaatatatgtatatgctgtgtcatactcataatctggaaatgaataaagtgatatattcctggtttgtaa

SEQ ID NO: 113 - DNA, 510 bp, Homo sapien
ttcgctcataagcccaaaggctcttaaaggagttttgcaatgcaatcctaatcgtgatgatataactctattcttaacttatcttagaaatacattacaaaagaccattctcaactttctgaaaactttaatatcttttataaaatctgaaagattgagacggtgttactaaaagtgtcacggctcattaaatcttgaatcattaagtcaagtaccttggacaaatcattttaaattaaaagaacaatctttaatatacattttcagatgagacttaatacattctacacaacttatcaaaagccacagaaaagctacggaaataatggaatgaacacacagtgatatttgcttcaggaacagactatttcaccctacatccttttaaagtgcttgagatatgcatatttagtaggcatatttcagaattagctcttcattttctaataaaaaaagggcagacttccctgcaggcttggcaatgaaacattttctaaaatgcaggtacca

SEQ ID NO: 114 - DNA, 752 bp, Homo sapien
cggtccgatggcgaatccggctgatacacacacgctaggaaatcaaacattcaattccataaacataatacatctgaagcaaagataatgccaccaggtattttttactttataagttggtccccagaaaaggataattataaaagacaccaggaagcctcttttcaaccttgttaaataaacgacttgcaaatattaaccacaaaactgtgggtgaagccactctgtcctgtcatgattactcgctcataagcccaaaggctcttaaaggagttttgcaatgcaatcctaatcgtgatgatataactctattcttaacttatcttagaaatacattacaaaagaccattctcaactttctgaaaactttaatatcttttataaaatctgaaagattgagacggtgttactaaaagtgtcacggctcattaaatcttgaatcattaagtcaagtaccttggacaaatcattttaaattaaaagaacaatctttaatatacattttcagatgagacttaatacattctacacaacttatcaaaagccacagaaaagctacggaaataatggaatgaacacacagtgatatttgcttcaggaacagactatttcaccctacatccttttaaagtgcttgagatatgcatatttagtaggcatatttcagaattagctcttcattttctaataaaaaaagggcagacttccctgcaggcttggcaatgaaacattttctaaaatgcaggtaccag

SEQ ID NO: 115 - DNA, 751 bp, Homo sapien
ctacataatccactgatacacacacactaagaaatcaaacatttccaattccataaacataatacatctgaagcaaagataatgccaccaggtattttttactttataagttggtccccagaaaaggataattataaaagacaccaggaagcctcttttcaaccttgttaaataaacgacttgcaaatattaaccacaaaactgtgggtgaagccactctgtcctgtcatgattactcgctcataaaggcccaaaatgcgtcttgaagggagtttttgcaatacaaatcctaatcttaattatataaactctattcttaactatcttaaaatacattacaaaagaccattctcaactttctgaaaactttaatatcttttataaaatctgaaagattgagacggtgttactaaaagtgtcacggctcattaaatcttgaatcattaagtcaagtaccttggacaaatcattttaaattaaaagaacaatctttaatatacattttcagatgagacttaatacattctacacaacttatcaaaagccacagaaaagctacggaaataatggaatgaacacacagtgatatttgcttcaggaacagactatttcaccctacatccttttaaagtgcttgagatatgcatatttagtaggcatatttcagaattagctcttcattttctaataaaaaaagggcagacttccctgcaggcttggcaatgaaacattttcaaaatgcaggtaccag

SEQ ID NO: 116 - DNA, 428 bp, Homo sapien
  misc_feature (321)..(321): n=a,c,g or t
gaaagattgagacggtgttatcttaaagtgtcacggctgcattaaatcgttgaatcattaagtcaagtaccttggacaaatcatttgttaattataaagtacaatcttgaatatacattttcagatgagacttaatacattctacacaacttatcaaaagcctactagataaagctacggaaataatggtaatgatacacacagtgtatatttgcttcagggacagactatttcacccttacatccttttaaagtgcttgagatatgcatatttagtaggcatatttcagtatattagctcttcattttctatatatatanaatatagggctagacttccccgcaggcttggcgatatgtaaactattttctaataatgcaaggtacacaggtagggtagtggtggttcatgcactgtaatctctagc

SEQ ID NO: 117 - DNA, 671 bp, Homo sapien
ccacagcgcccggccagcatgtgtttctgttttccgcaggaagagaatcatgtcgactcacaattcacaatgagtcaaccggtgtgtaaaatattttacataatgggaaaatttattgtgacccaaaagttcagtgtgttctcattaagttaccagaaattacagatgtgaagatactcctgttaacttaaccaaaatcaagaaaagaaactactttagatacgcacacattttcagtttggtagatctgattctttttatgatactgcatttcaagttactcagattggtaaattcatagcttaaatactaaatagagaaaatctgcatattgacaacataggtaatttaagactggttttggcactgcgtcacttactacctatatagctaagctctgtcaaaacctgacagggacagcttcagtttttgtaaatactcgcatggtgaaatggtttttccaaagttatgataccatctaaagtgctaatggagccttcccattgtgcttcacggtgaataacatatttctgtggaaaatcttatagtgttgcatccatttaacattttcccagaatacattcaggtttttttaatcccgaagaaaacatttaaacaattaaaacacataaaatttttctattatgacctttaaaaaacctcagtcttta

SEQ ID NO: 118 - DNA, 679 bp, Homo sapien
ccacagcgcccggccagcatgtgtttctgttttccgcaggaagagaatcatgtcgactcacaattcacaatgagtcaaccggtgtgtaaaatattttacataatgggaaaatttattgtgacccaaaagttcagtgtgttctcattaagttaccagaaattacagatgtgaagatactcctgttaacttaaccaaaatcaagaaaagaaactactttagatacgcacacattttcagtttggtagatctgattctttttatgatactgcatttcaagttactcagattggtaaattcatagcttaaatactaaatagagaaaatctgcatattgacaacataggtaatttaagactggttttggcactgcgtcacttactacctatatagctaagctctgtcaaaacctgacagggacagcttcagtttttgtaaatactcgcatggtgaaatggtttttccaaagttatgataccatctaaagtgctaatggagccttcccattgtgcttcacggtgaataacatatttctgtggaaaatcttatagtgttgcatccatttaacattttcccagaatacattcaggtttttttaatcccgaagaaaacatttaaacaattaaaacacataaaatttttctattatgaccttttaaaaaacctcagtcttttattttat

SEQ ID NO: 119 - DNA, 603 bp, Homo sapien
ccacacccagccttattctttgaaaagtagctcattgttgcatgttgggatttgtgatcacatatatttttatgatgtaacaaaaggcagttttgggaaatattactagttagctcttcaggtgtttacttgtttaaagctctttagttgtttagaagcatctgacttaacggagtagagctttgaatgctgatttaagactgacttcagcctgggcgacagagcgaaaaacaaaaaaaaagctaaagaaaaaagaggtcaaggactccgtccttggaatcctaagaaaattttccagccgtattacccttctatgaagcccacctgtcaaccaacaagcacccactcgatcagagcttccccaggctttttggtgtctcctccttgcatgggaattgacttccaaggaccaccagacactgaggaagtattttaacatataaagcaaaagcaacaatagggcagctggagaaaggaaattagaagtaacagagccaatgcagtgattagaaaaacactcaaaaaaatggtaataaatgtgttcaatgggtcaagagaacatatttccatctatttaaataaaaacaggaatcaataaaagtg

SEQ ID NO: 120 - DNA, 616 bp, Homo sapien
ccacacccagccttattctttgaaaagtagctcattgttgcatgttgggatttgtgatcacatatatttttatgatgtaacaaaaggcagttttgggaaatattactagttagctcttcaggtgtttacttgtttaaagctctttagttgtttagaagcatctgacttaacggagtagagctttgaatgctgatttaagactgacttcagcctgggcgacagagcgaaaaaaaaaaaaaaagctaaagaaaaggaaaagaggtcaaggactccgtccttggaatcctaagaaaattttccagccgtattacccttctatgaagcccacctgtcaaccaacaagcacccactcgatcagagcttccccaggctttttggtgtctcctccttgcatgggaattgacttccaaggaccaccagacactgaggaagtattttaacatataaagcaaaagcaacaatagggcagctggagaaaggaaattagaagtaacagagccaatgcagtgattagaaaaacactcaaaaaatggtaataaatgtgttcaatgggtcaagagaacatatttccatctatttaaataaaaacaggaatcaataaaagtgaaaaaaaaaa

SEQ ID NO: 121 - DNA, 611 bp, Homo sapien
atctgcatgtaaaggggtatgatttctgctctcttttaaattaggccagatgacacgtgtagctttgattatgtagtgaaacatgtaatctccttgcttgagtcacacgggcagagcctgacaccacatcaaaaggccctgagtacagatgaagtagaaggaggaccgaatggaagaatgcctcttgtcattattcgagtgcacgatcccttgctcgcctctcaacattcatctctctttacgtcttatataaaccagctgtttctcatctcagtggcttttctcaagcttctcctctgcccagtgtccatttctgccttccttttgcccttatgatgctttattttctactcatctttgaatatctgttctggtttcacttcaagtggcttctctcagaagctgtgcttggcattcagagtgattctatagtgacgctaatgaggcttaagtttcagggccactcccttgcatgggtcctttccaaggccctgggagggccttagcagtgttttcacgtggctatgtttttaaaaataaaatctgtagactatattttaaacataattgtctttagactctccatttcaactaccgctccaagatgggtg

SEQ ID NO: 122 - DNA, 771 bp, Homo sapien
atctgcatgtaaaggggtatgatttctgctctcttttaaattaggccagatgacacgtgtagctttgattatgtagtgaaacatgtaatctccttgcttgagtcacacgggcagagcctgacaccacatcaaaaggccctgagtacagatgaagtagaaggaggaccgaatggaagaatgcctcttgtcattattcgagtgcacgatcccttgctcgcctctcaacattcatctctctttacgtcttatataaaccagctgtttctcatctcagtggcttttctcaagcttctcctctgcccagtgtccatttctgccttccttttgcccttatgatgctttattttctactcatctttgaatatctgttctggtttcacttcaagtggcttctctcagaagctgtgcttggcattcagagtgattctatagtgacgctaatgaggcttaagtttcagggccactcccttgcatgggtcctttccaaggccctgggagggccttagcagtgttttcacgtggctatgtttttaaaaataaaatctgtagataatattttaaccataattgttttagactctccatttcaactaccgctccaagatgggttggggggtacctcctcttgtgataggtggcgttggaatgaccaggacattttggggaatcagggtaaagggatgttgagtttggaatacattagtttgggttttagtggaataatatatttacgtggttgttaatataggaaatggtgtggctgggcacggt

SEQ ID NO: 123 - DNA, 1247 bp, Homo sapien
gagcctaccacgctgctgaactgcccaatctgtggtcattctagtcttcatagacttgaaagctaagctatttccagtgataagactacctgaccaccttatgacaatggcaggtgaaagttgtagaaaatattggaatgttcctcttacggtgtaccaggagagcagagtgctgattaaatgtttcttttcctaagtgacttctatttaggactgcatatttttcaggcctttctttaagcagaataaaaattcaccaggctctgaattgacttatcactatggaatactgaacttattaagattaagtctcctaaagtattgggggaattgaggtatgctgggcttaccttgttctcattttgaaggaagctttggtgcccctgaaatgctatggtggttttattacgatgaaggctaagttgcccttgcaacattcattgcctactaatgaggttgtgtggtaataagagtttctgcatttctgtagtcatacatgtgccttttggacatattgaactactatacagataatttgttcttttggtccttttattggtttattggcttaacgatgggtaaagttgttacctgaagtttataaatttctccttctaggattttctgtggtttattgtaaaatgaagaatcattttttaagtctttcaattaaaaccttatttattgaattttcatgtcttaaccatagtagctaccctgtattgagaatagacatattaatagaatatgattatgaaaatttcagtgtattctgtggttagtgtggttagtggatagcagtcttttgctattgttacaggaaacaaatctgtacttattagaaaaatcatgtttttacttttatctgagggctaccaaagatatctggctatttaatttaaaggtttttggttgtctttggtaccatagatgtcagcattatacacaaaaggtgaaacattgttcaccaaatagtaatccattaccacagcagagtgatgggaggtgaataagtaatgtagttatttcttatgtttttctttgtgaattgtagagtatgttaataacatcatcattattactggcagaaatgtaagaagtagagacaattttacatttcagaaaggactgattaagtgttatcaggatgtactggtggtatagtgtattaaaatggaaatgtaacaatatggcaataataaagctgttttaccgtgtattagaaaatatttaaataaaactgatgg

SEQ ID NO: 124 - DNA, 1785 bp, Homo sapien
atgtcactcttctgcttaaagaccccagtgactccccatctcacttacagtaaaagccataggccttatggtggcctgcaagacctgcataatcattttgcctgctgcctttcttgtaattattgtgtcattggaacacaataatgcccattcatttatctgttgtctgtgtttgctttctctaaaatgtcaaagttgaatagttgtgacagaaactatatggcttgcaacacctggactatttcctatttgtcccttttcaggaaaagtttgctgaccccctgatctagagcataagattcttggtgacagggactcattttaatcgcagttgatttcatatcatttcaactgtgatttggcatctagtagattttttacaattcttgaagggtggacagatctagatatatatgactagggtgctagtttcttttctacttctactcctttttttctactagtttctactgcaaacttgctcccaagtaaatgcatgatgttacaacttctcagccgatgtcatggagcctaccacgctgctgaactgcccaatctgtggtcattctagtcttcatagacttgaaagctaagctatttccagtgataagactacctgaccaccttatgacaatggcaggtgaaagttgtagaaaatattggaatgttcctcttacggtgtaccaggagagcagagtgctgattaaatgtttcttttcctaagtgacttctatttaggactgcatatttttcaggcctttctttaagcagaataaaaattcaccaggctctgaattgacttatcactatggaatactgaacttattaagattaagtctcctaaagtattgggggaattgaggtatgctgggcttaccttgttctcattttgaaggaagctttggtgcccctgaaatgctatggtggttttattacgatgaaggctaagttgcccttgcaacattcattgcctactaatgaggttgtgtggtaataagagtttctgcatttctgtagtcatacatgtgccttttggacatattgaactactatacagataatttgttcttttggtccttttattggtttattggcttaacgatgggtaaagttgttacctgaagtttataaatttctccttctaggattttctgtggtttattgtaaaatgaagaatcattttttaagtctttcaattaaaaccttatttattgaattttcatgtcttaaccatagtagctaccctgtattgagaatagacatattaatagaatatgattatgaaaatttcagtgtattctgtggttagtgtggttagtggatagcagtcttttgctattgttacaggaaacaaatctgtacttattagaaaaatcatgtttttacttttatctgagggctaccaaagatatctggctatttaatttaaaggtttttggttgtctttggtaccatagatgtcagcattatacacaaaaggtgaaacattgttcaccaaatagtaatccattaccacagcagagtgatgggaggtgaataagtaatgtagttatttcttatgtttttctttgtgaattgtagagtatgttaataacatcatcattattactggcagaaatgtaagaagtagagacaattttacatttcagaaaggactgattaagtgttatcaggatgtactggtggtatagtgtattaaaatggaaatgtaacaatatggcaataataaagctgttttaccgtgtattagaaaatatttaaataaaactgatggacaacaaaaaa

SEQ ID NO: 125 - DNA, 2416 bp, Homo sapien
atgaccttcaaaccctgaagttaactaaaggttcatattttaaacttctgttgtttatctacacttatactttagctgacctcatcctgtctcatggttttatgtacagtactttttaacttactctcaaatttatatcaagtataacctcttccctgaactccagagtcatgtctaattgtctaatatcttcactttaatgaataatggtcatctcaaacttactgtatccaaagctaaaatcctgattttctgtcccaaaatggctccttccatacacttcccatcatatggggaagaaaaccccatgctacttgttcaggccacaaaccttagagttatccttactctcctctttcaccctacatccaatcccgtagcaaatcatgattataccttctatatataatcagaatcaaaccacgttttgccactgtcactgctaccatccattagtttgcaagataaactcatctctctcattttgttgcaataatttttgaactgttttctttgcttatacccttccgattttctggcatctctaccctttccattatactctccacaccgcagctaaggtcatcctttttgatgatgatgctttttaagagcaattatgtcactcttctgcttaaagaccccagtgactccccatctcacttacagtaaaagccataggccttatggtggcctgcaagaccctgcataatcattttgcctgctgcctttcttgtaattattgtgtcattggaacacaataatgcccattcatttatctgttgtctgtgtttgctttctctaaaatgtcaaagttgaatagttgtgacagaaactatatggcttgcaacacctggactatttcctatttgtcccttttcaggaaaagtttgctgaccccctgatctagagcataagattcttggtgacagggactcattttaatcgcagttgatttcatatcatttcaactgtgatttggcatctagtagattttttaaaattcttgaagggtggacagatctagatatatatgaatagggtgctagtttcttttctacttctactcctttttttctactagtttctactgcaaacttgctcccaagtaaatgcatgatgttacaacttctcagaagatgttcatggagcctaccacgctgctgaactgcccaatctgtggtcattctagtcttcatagacttgaaagctaagctatttccagtgataagactacctgaccaccttatgacaatggcaggtgaaagttgtagaaaatattggaatgttcctcttacggtgtaccaggagagcagagtgctgattaaatgtttcttttcctaagtgacttctatttaggactgcatatttttcaggcctttctttaagcagaataaaaattcaccaggctctgaattgacttatcactatggaatactgaacttagttaagattaagtctcctaaagtattgggggaattgaggtatgctgggcttaccttgttctcattttgaaggaagctttggtgcccctgaaatgctatggtggttttattacgatgaaggctaagttgcccttgcaacattcattgcctactaatgaggttgtgtggtaataagagtttctgcatttctgtagtcatacatgtgccttttggacatattgaactactatacagataatttgttcttttggtccttttattggtttattggcttaacgatgggtaaagttgttacctgaagtttataaatttctccttctaggattttctgtggtttattgtaaaatgaagaatcattttttaagtctttcaattaaaaccttatttattgaattttcatgtcttaaccatagtagctaccctgtattgagaatagacatattaatagaatatgattatgaaaatttcagtgtattctgtggttagtgtggttagtggatagcagtcttttgctattgttacaggaaacaaatctgtacttattagaaaaatcatgtttttacttttatctgagggctaccaaagatatctggctatttaatttaaaggtttttggttgtctttggtaccatagatgtcagcattatacacaaaaggtgaaacattgttcaccaaatagtaatccattaccacagcagagtgatgggaggtgaataagtaatgtagttatttcttatgtttttctttgtgaattgtagagtatgttaataacatcatcattattactggcagaaatgtaagaagtagagacaattttacatttcagaaaggactgattaagtgttatcaggatgtactggtggtatagtgtattaaaatggaaatgtaacaatatggcaataataaagctgttttaccgtgtattagaaaatatttaaataaaactgatggacaacctaagaaacaatctt

SEQ ID NO: 126 - DNA, 217 bp, Homo sapien
ggaaaactttcccaggcagcaggaaactttagaaagttttggaaaatatgtttggagaagtatttagagttcaaataatatttatttttgaattgtaaacagcctctgaatgtattgaagagctcttaaaattttttggatctcaaaagtgatatgtactatgttaagaaatttatttaagtaagtacttgaaagatgtattaaaatatgattgggg

SEQ ID NO: 127 - DNA, 573 bp, Homo sapien
tgtaagactgagaagaattagtatcctcgaatcaaaatagtttacaagtatcttcaaacttgatttcatagaaaagtgttagttttcagagataaattctgagtcttaaatttgattgactgaggagatggacactcctaagatgggtttcacagcaaaagcattacctcttctcacaatcaagaacaggaaaggattataattatctgaagatataagatcagttctatgatacaagccagactttcagtcttcaaaactaaagaagcaaagagcattcaagcacagaattctagggaaaaaggcaaccttatggaaaagattacatatacatatggcatattaaagcaatgaggaaaactttcccaggcagcaggaaactttagaaagttttggaaaatatgtttggagaagtatttagagttcaaataatatttatttttgaattgtaaacagcctctgaatgtattgaagagctcttaaaattttttggatctcaaaagtgatatgtactatgttaagaaatttatttaagtaagtacttgaaagatgtattaaaatatgattggggaa

SEQ ID NO: 128 - DNA, 116 bp, Homo sapien
ggaaaactttcccaggcagcaggaaactttagaaagttgtggaaaatatgtttggagaagtatttagagttcaaataataatttatttttgaagttgtaaacagcctctgaatgta

SEQ ID NO: 129 - DNA, 217 bp, Homo sapien
aaaactttcccaggcagcaggaaactttagaaagttttggaaaatatgtttggagaagtatttagagttcaaataatatttatttttgaattgtaaacagcctctgaatgtattgaagagctcttaaaattttttggatctcaaaagtgatatgtactatgttaagaaatttatttaagtaagtacttgaaagatgtattaaaatatgattggggaa

SEQ ID NO: 130 - DNA, 591 bp, Homo sapien
gcatttctttagaaatttccccaatcatattttaatacatctttcaagtacttacttaaataaatttcttaacatagtacatatcacttttgaaatccaaaaaattttaagagctcttcaatacattcaggggctgtttacaattcaaaaataaatattgtttgaactctaaatacttctccaaacatattttccaaaactttctaaagtttcctgctgcctgggaaaattttcctcattgctttaatatgccatatgtatatgtaatcttttccataaggttgcctttttccctagaattctgtgcttgaatgctctttgcttctttagttttgaagactgaaagtcttgcttgtatcatagaactgatcttatatcttcagataattataatcctttcctgttcttgattgtgagaagaggtaatgcttttgctgtgaaacccatcttaggagtgtccatctcctcagtcaatcaaatttaagactcagaatttatctctgaaacctaacacttttctatgaaatcaagtttgaagatacttgtaaactattttgatttgaggatactaatttcttctcagtcttacca

SEQ ID NO: 131 - DNA, 1086 bp, Homo sapien
cggccgctccgcctgccgcgcagccccagcgccggggccgcctttgagctggtcgggaagggggcggggcctgcggcgtgtcggccagtcgcggcgcggcccggaactttccgccaatagcaggcgcggggcggagcgggggcggggccggagctcgggcgccgccggaggactatcccacggtccaagcgcctcgagggttggggggggccttggcgcggaagggaggctccttgcccgccccgcgctgtgcgtctctccttcgccgcgccctcaccctggcctcgccccccgcgctgtcccgatcggagtcctggagcctctgatggagccgaggttttgatgtccactggaacctcggggtggcggtagggaaggtggcccacctggtggttccgcctcgcgggcggccgggcctgctccttcctaacactgggacctgggcctgttggccacatccctcccaaccaggtccggtcctgctgaccagaggccggtggagccccagaggagaggggtcatgactccagaggcggggaaggcctggcctgggggctgcgccttggagcggggccaggcctcgggttttggtaaggccgtctgcaggagggggtcctgctgaagagcgcgcagcccgcaggcttaggcccctttcctcagacctagcggcaccccatagttgccggatgaccgaccccgggccagacggggctcctggaggggcgtgaatggagcagccacgggcacccctgcaggcctgcagcacgtggagacacaggagctgggaggacaccctgggccacaggagcagcccccaccaagatgaaacaagcagaaacaggcgattcgcaaacacactgtagcctcaggctggagcagtgtgggattcccagcatccgggactgctgagttggcctgatgggaggaagtgggcagtggctggccaggtggacaggaagagaatgggggagagcagacagcctgggtcaagggcctgaggaaggagctcttggcagcccagtgaaaccccagggcatgggtggtgggtggggacgacaggtcagatcacagaaggcctaaggcaca

SEQ ID NO: 132 - DNA, 2690 bp, Homo sapien
tgtgccttaggccttctgtgatctgacctgtcgtccccacccaccacccatgccctggggtttcactgggctgccaagagctccttcctcaggcccttgacccaggctgtctgctctcccccattctcttcctgtccacctggccagccactgcccacttcctcccatcaggccaactcagcagtcccggatgctgggaatcccacactgctccagcctgaggctacagtgtgtttgcgaatcgcctgtttctgcttgtttcatcttggtgggggctgctcctgtggcccaggggtgtcctcccagctcctgtgtctccacgtgctgcaggcctgcaggggtgcccgtggctgctccattcacgcccctccaggagccccgtctggcccggggtcggtcatccggcaactatggggtgccgctaggtctgaggaaaggggcctaagcctgcgggctgcgcgctcttcagcaggaccccctcctgcagacggccttaccaaaacccgaggcctggccccgctccaaggcgcagcccccaggccaggccttccccgcctctggagtcatgacccctctcctctggggctccaccggcctctggtcagcaggaccggacctggttgggagggatgtggccaacaggcccaggtcccagtgttaggaaggagcaggcccggccgcccgcgaggcggaaccaccaggtgggccaccttccctaccgccaccccgaggttccagtggacatcaaaacctcggctccatcagaggctccaggactccgatcgggacagcgcggggggcgaggccagggtgagggcgcggcgaaggagagacgcacagcgcggggcgggcaaggagcctcccttccgcgccaaggccccccccaaccctcgaggcgcttggaccgtgggatagtcctccggcggcgcccgagctccggccccgcccccgctccgccccgcgcctgctattggcggaaagttccgggccgcgccgcgactggccgacacgccgcaggccccgcccccttcccgacccgctccaaggcggccccggcgctggggctgcgcggcaggcggagcggccgcgggcttgggggcttcgccggggccggcggtggtgagagccccgactccccggacgccgcccgccgtgccatggggttcccggccgcggcgctgctctgcgcgctgtgctgcggcctcctggccccggctgcccgcgccggctactccgaggagcgctgcagctggaggggcagcggcctcacccaggagcccggcagcgtggggcagctggccctggcctgtgcggagggcgcggttgagtggctgtacccggctggggcgctgcgcctgaccctgggcggccccgatcccagagcgcggcccggcatcgcctgtctgcggccggtgcggcccttcgcgggcgcccaggtcttcgcggagcgcgcagggggcgccctggagctgctgctggccgagggcccgggcccggcagggggccgctgcgtgcgctggggtccccgcgagcgccgggccctcttcctgcaggccacgccgcaccaggacatcagccgccgcgtggccgccttccgctttgagctgcgcgaggacgggcgccccgagctgcccccgcaggcccacggtctcggcgtagacggtgcctgcaggccctgcagcgacgctgagctgctcctggccgcatgcaccagcgacttcgtaattcacgggatcatccatggggtcacccatgacgtggagctgcaggagtctgtcatcactgtggtggccgcccgtgtcctccgccagacaccgccgctgttccaggcggggcgatccggggaccaggggctgacctccattcgtaccccactgcgctgtggcgtccacccgggcccaggcaccttcctcttcatgggctggagccgctttggggaggcccggctgggctgtgccccacgattccaggagttccgccgtgcctacgaggctgcccgtgctgcccacctccacccctgcgaggtggcgctgcactgaggggctgggtgctggggaggggctggtaggagggagggtgggcccactgctttggaggtgatgggactatcaataagaactctgttcacgcaaaaaaaaaaaaaaaaaaaaaaaaaaaaaaaaaaaaaaaaaaaamaaagggggggcggaaaaaaaatacacccgaggggggccccaagaaaagcgaaaaccccaacgtttgtatggtgcacaaagagggggacgaccaaaaagagaggaacggaaacataaaagcaaatggacgaaaagagcggacagtaacaacacacaggagcaagagtgagaaaaaagtgcacaaacaggagtaaactataggagagagaaacacaaacaacggggggggagagcggaacgccaataagagtacgaaaacaaaatattactcaacaaagaaagaaaattatatgaaaacgcgcatagaaggagggaggaaaaatatataaacaattttgtaaaaagagggtgtataaaaatgggtgttttaaaacaaaatgagggcaggaaaataagagggagtggcaggtaataagaagaaaaagtatgttgccataaacaggagggatattaaattaatagaagagaaaaaattttattttaaaccagggggaagagatgagaaaaaaataaagt

SEQ ID NO: 133 - DNA, 2398 bp, Homo sapien
tgtgccttaggccttctgtgatctgacctgtcgtccccacccaccacccatgccctggggtttcactgggctgccaagagctccttcctcaggcccttgacccaggctgtctgctctcccccattctcttcctgtccacctggccagccactgcccacttcctcccatcaggccaactcagcagtcccggatgctgggaatcccacactgctccagcctgaggctacagtgtgtttgcgaatcgcctgtttctgcttgtttcatcttggtgggggctgctcctgtggcccaggggtgtcctcccagctcctgtgtctccacgtgctgcaggcctgcaggggtgcccgtggctgctccattcacgcccctccaggagccccgtctggcccggggtcggtcatccggcaactatggggtgccgctaggtctgaggaaaggggcctaagcctgcgggctgcgcgctcttcagcaggaccccctcctgcagacggccttaccaaaacccgaggcctggccccgctccaaggcgcagcccccaggccaggccttccccgcctctggagtcatgacccctctcctctggggctccaccggcctctggtcagcaggaccggacctggttgggagggatgtggccaacaggcccaggtcccagtgttaggaaggagcaggcccggccgcccgcgaggcggaaccaccaggtgggccaccttccctaccgccaccccgaggttccagtggacatcaaaacctcggctccatcagaggctccaggactccgatcgggacagcgcggggggcgaggccagggtgagggcgcggcgaaggagagacgcacagcgcggggcgggcaaggagcctcccttccgcgccaaggccccccccaaccctcgaggcgcttggaccgtgggatagtcctccggcggcgcccgagctccggccccgcccccgctccgccccgcgcctgctattggcggaaagttccgggccgcgccgcgactggccgacacgccgcaggccccgcccccttcccgacccgctccaaggcggccccggcgctggggctgcgcggcaggcggagcggccgcgggcttgggggcttcgccggggccgggcggccggcgcccccggctgctcccgccgccgcccggacccgcgccccgccggggcagcggtggtgagagccccgactccccggacgccgcccgccgtgccatggggttcccggccgcggcgctgctctgcgcgctgtgctgcggcctcctggccccggctgcccgcgccggctactccgaggagcgctgcagctggaggggcagcggcctcacccaggagcccggcagcgtggggcagctggccctggcctgtgcggagggcgcggttgagtggctgtacccggctggggcgctgcgcctgaccctgggcggccccgatcccagagcgcggcccggcatcgcctgtctgcggccggtgcggcccttcgcgggcgcccaggtcttcgcggagcgcgcagggggcgccctggagctgctgctggccgagggcccgggcccggcagggggccgctgcgtgcgctggggtccccgcgagcgccgggccctcttcctgcaggccacgccgcaccaggacatcagccgccgcgtggccgccttccgctttgagctgcgcgaggacgggcgccccgagctgcccccgcaggcccacggtctcggcgtagacggtgcctgcaggccctgcagcgacgctgagctgctcctggccgcatgcaccagcgacttcggagggtgggcccactgctttggaggtgatgggactatcaataagaactctgttcacgcaaaaaaaaaaaaaaaaaaaaaaaaaaaaaaaaaaaaaaaaaaaamaaagggggggcggaaaaaaaatacacccgaggggggccccaagaaaagcgaaaaccccaacgtttgtatggtgcacaaagagggggacgaccaaaaagagaggaacggaaacataaaagcaaatggacgaaaagagcggacagtaacaacacacaggagcaagagtgagaaaaaagtgcacaaacaggagtaaactataggagagagaaacacaaacaacggggggggagagcggaacgccaataagagtacgaaaacaaaatattactcaacaaagaaagaaaattatatgaaaacgcgcatagaaggagggaggaaaaatatataaacaattttgtaaaaagagggtgtataaaaatgggtgttttaaaacaaaatgagggcaggaaaataagagggagtggcaggtaataagaagaaaaagtatgttgccataaacaggagggatattaaattaatagaagagaaaaaattttattttaaaccagggggaagagatgagaaaaaaataaagt

SEQ ID NO: 134 - DNA, 477 bp, Homo sapien
gtgcgtggagataacatgcttctattgatcctgatgcttctccatctcatttacagagaagatgcagggcaggctgttgccacttcctgacatatctttctgggcttgctctttcagccccacgttttcactcactagcttcaaaagctatgaggtcccattcaagacatcctactctctaaagccttctttataccagtttgacttagcttcaattggcacagaaaaatctgggaatgaaagatgtgattgtaagctcatatggcaaaaagaagaagacagctgtgtgcaaaaaagtttatggctaacagaatgatgtttctttagctagcaaatttatatgttgtaaatgtcattagcatgattgggatgtatttgataacttgtagagttatactactgtctatgtagatgctttcttaaaattttagttaaaaagtatagaagtgagttttacctcagtgaatttctgcaaca

SEQ ID NO: 135 - DNA, 476 bp, Homo sapien
gtgcgtggagataacatgcttctattgatcctgatgcttctccatctcatttacagagaagatgcagggcaggctgttgccacttcctgacatatctttctgggcttgctctttcagccccacgttttcactcactagcttcaaaagctatgaggtcccattcaagacatcctactctctaaagccttctttataccagtttgacttagcttcaattggcacagaaaaatctgggaatgaaagatgtgattgtaagctcatatggcaaaaagaagaagacagctgtgtgcaaaaaagtttatggctaacagaatgatgtttctttagctagcaaatttatatgttgtaaatgtcattagcatgattggatgtatttgataacttgtagagttatactactgtctatgtagatgctttcttaaaattttagttaaaaagtatagaagtgagttttacctcagtgaatttctgcaaca

SEQ ID NO: 136 - DNA, 3297 bp, Homo sapien
agccttaccccttactggaggctgcaggaccctctacacacagacagctgtccagcacggaaggtgggctgaggcccagggtgaacatgccagctaatgggacatcaccccagagattccctgccctgattccaggagaacctggcagatcttttgaggggtccgtgtcattcgaggatgtggctgtggatttcacccgacaggagtggcacagactggaccctgctcagaggaccatgcacaaggatgtgatgctggagacctacagcaacctggcatctgtgggcctctgcgtggccaaaccagagatgatcttcaagttggagcgaggagaagagctgtggatattagaggaggaatcctcaggccatggttactcaggatctctctcactgctgtgtggcaatggttctgttggggataatgccctcaggcatgataatgaccttcttcaccatcagaagattcaaacattggatcaaaatgttgaatataatggatgcaggaaagccttccatgagaaaacaggctttgttagacgtaaaagaacacccagaggagataaaaactttgaatgtcatgaatgtgggaaagcttactgtaggaagtcaaaccttgttgaacatctgagaatacacacaggagagagaccctatgaatgcggtgaatgtgcaaaaaccttcagtgcaagatcatacctcattgctcatcagaaaactcacacaggggagaggccctttgaatgtaatgaatgtgggaaatcttttggcaggaagtcacaactcatcctacatacaagaacacacactggagagagaccctatgaatgtactgaatgtgggaaaaccttttctgagaaggcaaccctcacgattcatcagagaactcacacaggggagaaaccctatgaatgtagtgaatgtgggaaaacatttcgtgtaaagatatcccttacccaacaccacagaactcatacaggggagaaaccttatgaatgtggggagtgtgggaaaaacttccgtgcaaagaaatccctaaatcagcatcaaagaattcacacaggtgagaaaccctatgagtgtggtgaatgtgggaaattcttccgaatgaagatgactctcaataatcatcaaagaactcacacaggtgaaaagccctatcagtgtaatgaatgtgggaaatctttcagggtgcactcatctcttgggatccatcagagaattcacacaggagagaaaccttacgaatgtaatgagtgtggtaatgctttctatgtgaaagcacgcctaattgaacatcagaggatgcattcaggagagaaaccctacgaatgtagtgaatgtgggaaaatcttcagtatgaagaaatccctttgtcaacaccggagaactcacacaggagagaaaccttatgaatgtagtgaatgtggaaatgccttctatgtgaaagtacgcctcattgaacatcagcgaattcacacaggagagagaccctttgagtgtcaagaatgtgggaaagctttctgccggaaagcacacctcacagaacatcagagaactcacataggctggtcctggcgttgtacaatgaagaaagcctctcactgaagacttccctcaccattggatcaagctccttgggggcatatgatcaccagggcacacagtgtgcctgtgaaaatttggcacctacatttgtatcaaagtatgtcctgatccccttaggggatagctcattgtttttattcagatttccctaattagtggtgtgtgaacatcttatctgttgattggctatttgggttttttcttctgtgcattgactgttcatgtcctctgctcattgttttcaaatgggctgttcatctcttgctttttggtttaaatgttgttttttaacatatgagaatataaaaatcctttttttttcagtcatatgtgttgcaaatatcttctcccagactgtcgttggttttttaaattttgccatctgttttcttctgctgaagttttatattttatttatttattttttatttttttgagatggagtctcactctgtcacccaggctggagtgcaatggcgcgatctcggctcactgcaacctccgcctcccgggttcaagcgattcttctgcctcagcctcctgagtagctgggattacaggcacccaccaccacgcccggctaatttttttttttttagtacagacggggtttcaccatgttggccaggctggtctccaactcctgaccttgtgatccgcctgcctaggcctcccaaagtgctgggattacaggtgtgagccactgccccaggcctgtttgcttttatgaattggaggactgcctgggcccagggaagccgctattcatctgcctaagctgtagctgttggatgacacaggatcctcatctcaagttgctttgaggacaagaccactttcttgggcccctctgcacgtgggcagtccttccatgatgacagctgccctgttatggtgggattactttggagggtggatgtggcccagggaagtgtgtactctcagtgggcaggccttctgttttgatcattttgtagcccagcatctaacacaaggtgctcgtgactcaagaccttatgtaaagagggagggatgaacacaaggaagaaagttccccagaaatccttccttacacctgaaccgattccttcctatatgtcctcagcttgagtcattttctgtagctccctcttatttccatcagatacttggatacattttaaattgtatcccccaaatatcagtgagagaaatcacatccatgatctacactgcattgaccaggccatccagacagagagcggggatggcttgtctcccagggcagtggtgccacgtgccagcctagaggtttcggtttacctgcatgcaccacggtcccttgagaatctgtgcccttcccctcctggtaggggatgcttggaaagggtcaatctgaggcccttgctttcatgaaaggccttgaggcccacagccaggcttctagaaatctagaattgaccctggtttccagaatgaccagtttgcatttcctttatctgcacaaagaagcggatttcttgggggtcttctgggtgtgagcgtagtgagtgtgaatgcatcaaggtgcctaaaaatacaaggacagatgccaaatataagcatttttaccttgaagctgccttgaattgagtttcgcaggaaaagtgtattaaaataattcttaaaaactaaaaaaaaaaaaaaaaaaagatctttaatataagcggac

SEQ ID NO: 137 - DNA, 814 bp, Homo sapien
  misc_feature (182)..(267): n=a,c,g or t
gtgggaggcaggagtgggctgtgtcacatcggagcatggtgctgctactggggtgactcgtggaaggttacaccatgcaatgggggtttcgctgcctttgcctgtccaccccaaatgactcctaacattggaaagaagtgagttgagtgtacatttaaaaaatactattctaggctgggcannnnnnnnnnnnnnnnnnnnnnnnnnnnnnnnnnnnnnnnnnnnnnnnnnnnnnnnnnnnnnnnnnnnnnnnnnnnnnnnnnnnnnctactcttgtaggcagctgtgaactcgatggacatttattcttaccaaatggtgatgttacagcttctctaagacgtggctccaccaccgggagtccgagtgctgccaagaggaggtctctactcggaacgcaggtgccgtctttacagtggagccccaggaagccgtgcaggtttgaggctcacctgagaaggcggcagtgctgtgttcctacctcagggttcactgcaaacaatgcatacgctgtagcagttgccagcttggtttgtcagtgctggtctccgtgattggttctcaggtgtgagttgtagcaaagttgcgtgttaatcagagagcgtcctgcccatcccagggtctcagcagggctgaggcagcgtttggggaccagatccgtgctgctccttggcgatgtgcaccacagtcatgggaccagagctaggcccactgtggggcgagtggacactcagctgggggtcccatttatgggacactaaaaaactcagcagtgaacacgacgttttaacacggtatgtcaagaaatcaaaat

SEQ ID NO: 138 - DNA, 534 bp, Homo sapien
ctgcattaattttgatttcttgacataccgtgttaaaacgtcgtgttcactgctgagttttttagtgtcccataaatgggacccccagctgagtgtccactcgccccacagtgggcctagctctggtcccatgactgtggtgcacatcgccaaggagcagcacggatctggtccccaaacgctgcctcagccctgctgagaccctgggatgggcaggacgctctctgattaacacgcaactttgctacaactcacacctgagaaccaatcacggagaccagcactgacaaaccaagctggcaactgctacagcgtatgcattgtttgcagtgaaccctgaggtaggaacacagcactgccgccttctcaggtgagcctcaaacctgcacggcttcctggggctccactgtaaagacggcacctgcgttccgagtagagacctcctcttggcagcactcggactcccggtggtggagccacgtcttagagaagctgtaacatcaccatttggtaagaataaatgtccatcgagtt

SEQ ID NO: 139 - DNA, 410 bp, Homo sapien
gtaaccctctaggagactagaggagctacagtgttatgttctgggtgggtggaatgactgagacacctgagctatgtcacattcagaaatcttaattagtttgcagagagcaagaaagaaattgcctactctgcatcccatcttctctgtttgtgtaaagagcccagtaaaacaagacatagcagctcaattcagaaatgtgaagcatgtaaccatgatccaagagttacctatatgattttcaacaaaagaaaacttggatatatttgggagctgtgaggccaagtcataataatacattagaaataaatttaatactgtatagtttttaaagtgttgaaatatgagtcccacaggaaaaggaaaatataaaagataataaattagatcaaaaagctgttacggggaga

SEQ ID NO: 140 - DNA, 419 bp, Homo sapien
gtaaccctctaggagactagaggagctacagtgttatgttctgggtgggtggaatgactgagacacctgagctatgtcacattcagaaatcttaattagtttgcagagagcaagaaagaaattgcctactctgcatcccatcttctctgtttgtgtaaagagcccagtaaaacaagacatagcagctcaattcagaaatgtgaagcatgtaaccatgatccaagagttacctatatgattttcaacaaaagaaaacttggcatatcatttgggcagctgtgaggcccaagtcatcaataatacattagcaaataaatttaatactgtatcagtttttaaagtgttgaaatatgagtcccacaggataaaggaaatatataaaagataataaattagatcaaaaagctgttacggggaga

SEQ ID NO: 141 - DNA, 411 bp, Homo sapien
gtaaccctctaggagactagaggagctacagtgttatgttctgggtgggtggaatgactgagacacctgagctatgtcacattcagaaatcttaattagtttgcagagagcaagaaagaaattgcctactctgcatcccatcttctctgtttgtgtaaagagcccagtaaaacaagacatagcagctcaattcagaaatgtgaagcatgtaaccatgatccaagagttacctatatgattttcaacaaaagaaaacttggatatatttgggagctgtgaggccaagtcataataatacattagaaataaatttaatactgtatagtttttaaagtgttgaaatatgagtcccacaggaaaaggaaaatataaaagataataaattagatcaaaaagctgttacggggaaga

SEQ ID NO: 142 - DNA, 367 bp, Homo sapien
cagaaagcttaatgtaaaggtggctgatactgctgtttccttagacactgacaccaaatacaataaagaagtctctcaagaggaaaacatggtgtgtttacaggagcaactaacagttggtttgtaggcatcctaaatggtggatggcaagcttgggtttcccaaaggtttctagtctttatacgtcttctagtaggtgcccaggttagtatggcctgtgttaccagagtaacaatgaaaatggctacgtctttaaatcaggccactttacagtgaactatggtccttaattgctatcacatttcaaacaagaactatgaccaattaaactttactattgttgaactgccaaaaaaaaaaaaaaggg

SEQ ID NO: 143 - DNA, 711 bp, Homo sapien
ataaacgaggtagatgttacagttaatggaacatcatgcagcttcatatctcctttttactcaagctggggcctatgtttggtattgaacaaaatggaatgctgcaattttctctctactgattttgttactacagaaagcttaatgtaaaggtggctgatactgctgtttccttagacactgacaccaaatacaataaagaagtctctcaagaggaaaacatggtgtgtttacaggagcaactaacagttggtttgtaggcatcctaaatggtggatggcaagcttgggtttcccaaaggtttctagtctttatacgtcttctagtaggtgcccaggttagtatggcctgtgttaccagagtaacaatgaaaatggctacgtctttaaatcaggccactttacagtgaactatggtccttaattgctatcacatttcaaacaagaactatgaccaattaaactttactattgttgaactgcctcaagttccagaagtttggtttgtttgatttagattggtctgtatgggctcttgttaaggagtgtactttggtcttttgataccattctcttggtagtgatcacagtcgtctctctgggtgtgttgtaccctctcaagtcttaaatatttgtatgcagccattcattgagcatcaaacggtttcattttgactagattagcaagaatataaaaaattatcaactgatg

SEQ ID NO: 144 - DNA, 483 bp, Homo sapien
ataaacgaggtagatgttacagttaatggaacatcatgcagcttcatatctcctttttactcaagctggggcctatgtttggtattgaacaaaatggaatgctgcaattttctctctactgattttgttactacagaaagcttaatgtaaaggtggctgatactgctgtttccttagacactgacaccaaatacaataaagaagtctctcaagaggaaaacatggtgtgtttacaggagcaactaacagttggtttgtaggcatcctaaatggtggatggcaagcttgggtttcccaaaggtttctagtctttatacgtcttctagtaggtgcccaggttagtatggcctgtgttaccagagtaacaatgaaaatggctacgtctttaaatcaggccactttacagtgaactatggtccttaattgctatcacatttcaaacaagaactatgaccaattaaactttactattgttgaactgcc

SEQ ID NO: 145 - DNA, 359 bp, Homo sapien
cggaaaaaaaagaactagtttaaattctgactgtatcactgaaaggctgtgtagctgtgtgaccgtaagcaagtcacttaactccagattctcagtgctgtcatctataaacagggatgaatgaatatacacctcagagttgttaagaatccaatgagaaaatcacgggtaacccttatataaatggttgtgaaacatttcaaagatacaagcatccttggcctttgcagcccagaatcatccctccacatttttcctacaatccaaccacatcaagaaatgataactgctcagaaagtttatcaatatttaccaaaactcatggatttaaaataaacattaagtttctaccataaaaa

SEQ ID NO: 146 - DNA, 1122 bp, Homo sapien
aaaataaacactggccaggcacaggggctcacacctgtaatcccagcattttgggaggccaaggcaggaggatcacttgagcccaggcgtttaagaccagcctgggcaacatagggagacccgtttctacaaaaaaagaaaaaattagctgggcttggtggtacacgcctgtagtcccagctgcacaggaggctgaggtgggaggaaggcttgaggccaggagttcaagatcagcctggtcaacatagcaagaccccatctctacaaaaaagaaaaaaattagcaaggcatggtggcatgtgcctgtagtccctgctactcaggaggctgaggcaggaggatcacttgagcccaggagttcaaggctgcagtgagccataatcctgcactgtagcctgggtgacagagtgagtcccccatctcggaaaaaaaagaactagtttaaattctgactgtatcactgaaaggctgtgtagctgtgtgaccgtaagcaagtcacttaactccagattctcagtgctgtcatctataaacagggatgaatgaatatacacctcagagttgttaagaatccaatgagaaaatcacgggtaacccttatataaatggttgtgaaacatttcaaagatacaagcatccttggcctttgcagcccagaatcatccctccacatttttcctacaatccaaccacatcaagaaatgataactgctcagaaagtttatcaatatttaccaaaactcatggatttaaaataaacattaagtttctacaataagcattcttgtaattctatgccatttgtactcccttgatcttcaccctatttggcaatatcaactttttttttttgagatggagtctcactttgtcacccaggctggagtgcagtggtgcaatctcggctcactgcaacctccgcctcccaggttcaagcaattctcgtgcctcagcctcccaagtagctgggattacaggcacgcaccaccacgtcttgctaatttttgtatttttagtagagatgggtttttaccatgatggtcaggctggtcttgaactcctgacctcaggtgatccacccacctcggcctcccaaagtgctgggattacaggcgtgagcca

SEQ ID NO: 147 - DNA, 283 bp, Homo sapien
cctagtttctgccactcctgctgttaaacttttttttttaaaagtttagtagttcacatatgtaaactattaatgcagaatgaactgctcatttcttcctccctgagttacctccatgagacaaatcctagtgtgggatgtcccggaactaccatgcacctttgccccaccgagtttcccaagaattgttgaaagcctttgctgcagtggtctgagcaggtgtgctgttgctgctgcaaaacataccttcatagctgaactgcttaggaagccagcagagaag

SEQ ID NO: 148 - DNA, 371 bp, Homo sapien
cctagtttctgccactcctgctgttaaacttttttttttaaaagtttagtagttcacatatgtaaactattaatgcagaatgaactgctcatttcttcctccctgagttacctccatgagacaaatcctagtgtgggatgtcccggaactaccatgcacctttgccccaccgagtttcccaagaattgttgaaagcctttgctgcagtggtctgagcaggtgtgctgttgctgctgcaaaacataccttcatagctgaactgcttaggaagccagcagagaagttttttccttccttccttccttccttccttccttccttccttcccccctctccattccattgtaattaaagtggcctagctaagtgca

SEQ ID NO: 149 - DNA, 217 bp, Homo sapien
cctagtttctgccactcctgctgttaaacttttttttttaaaagtttagtagttcacatatgtaaactattaatgcagaatgaactgctcatttcttcctccctgagttacctccatgagacaaatcctagtgtgggatgtcccggaactaccatgcacctttgccccaccgagtttcccaagaattgttgaaagcctttgctgcagtggtctgagc

SEQ ID NO: 150 - DNA, 879 bp, Homo sapien
gaaaatgttcccttctgtagaaactttattaatcccttatgatcttaatactgttaataatggactagactgtaaaggattaggtaactgaggtgttcaatatggatacttgttttatgtttaatcaaatttatctgactctaaataaatttggctgaaactagacagattccttttctattgagacagtgggctctattaagcactatgtctgcataggaaacattacaattaattttgcagtgacaatatgctttttaactaacagactaatggaaggaggactgatgtaaagcataattctcaaaaagaggggggtaaaaccttggtttctactacaattattcattttatagtattgtttgataacacatactttattaaattgtagatgcattgtaagtttttatagtatatgggaatctaaataaaaggagttatttggttgttatgccatatttagcataaatattaccatccatgtatgttgttgacttaaaacactgttattttctaaaatgtaagcatagaaaaagaataaaattcttagttgatattgcagaaatatattgtagtgtttgcagcatgaaaaggttttatatataataatatacacttaataattaatttccaaaggctgcctgtggtcagccttctttgaaagcatggattctggcaaatgagcaatataatctctttaagaccatttaagctcttaatctcttcaaaccagtaccaaagtctgttcattttgttgtaatagttattgtgtattgtttctttttaattgtgtaagtgagattcaacatcacttgtcagataagaaaaaaaaccttcaaaataaacgttaatttttcccattattgctagaaggaactt

SEQ ID NO: 151 - DNA, 879 bp, Homo sapien; identical to SEQ ID NO: 150

SEQ ID NO: 152 - DNA, 360 bp, Homo sapien
ggtattgatttgagtattattagtaattaatctccttgtctaggtttcttcacatacaaatttccaagtattgttcaaaggaagtctgtaagatttaggccattgttttacaaaatacaaatatttggcttggtgagaatgtcttcctatagataactaagaaacttttagacttgtggatgttctttaaattactgtctaatgaatgcacagtaaaatcaaagatcaaccaagtatagcaaattgcagcagcatattttagaaaggatgttatataagaagcaaggatacctgaatcctagtcttggcttcaatagttactagctccagacacaggatacagtgtaactttgggtgatt

SEQ ID NO: 153 - DNA, 360 bp, Homo sapien; identical to SEQ ID NO: 152

SEQ ID NO: 154 - DNA, 150 bp, Homo sapien
gattggttggttcgggtgagctctgaaagccctaaaaagaaaaaggtgctggttttcagggtacttgagtaagctgtcatctctagtcaaaaaagggccacttggatctattttaaatttagggccagtggccgggcacggtggctcact

SEQ ID NO: 155 - DNA, 150 bp, Homo sapien
gattggttggttcgggtgagctctgaaagccctaaaaagaaaaaggtgctgggtttcagggtacttgagtaagctgtcatctctaggcaaaaaagggccacttggatctattttaaatttagggccagtggccgggcacggtggctcact

SEQ ID NO: 156 - DNA, 129 bp, Homo sapien
gattggttggttcgggtgagctctgaaagccctaaaaagaaaaaggtgctggttttcagggtacttgagtaagctgtcatctctagtcaaaaaagggccacttggatctattttaaatttagggccagt

SEQ ID NO: 157 - DNA, 612 bp, Homo sapien
tgccccagcctgctgtgtgaccttagtcatgtagcttaccctctctgggcaacttttctttctccatctataaaatgaaggggttagactgggtcaacactgagcctccccctgagtctgagtctttgttgtctgtagatctgcctgatttggggtggctctgctggtactcccacttcctgctccatatctacctccccttggtatcccacattgtctcctgcatgtcttgttgccccagggccctgactggtactcctataattaactcctgcccatgctcaggacatggagggcctgcttggcttggccagacccagtggcctgttggggcccgggccccaccctcacggactggccagcgttcccaaccccagggccagggcaaggcgtctgctcccacagtggctacctccagccggcccagcacattcctcaggcttatctggaggcccgccccactggactctgccctcccacccaggaagcagcacccagagctgcgtgcggaagagttgcagggcctgggaacaggccctgcgtgagctcgaggtagtgattcttagcctggggctggagagaaacaggtagaggaccgggtggggcaggagg

SEQ ID NO: 158 - DNA, 614 bp, Homo sapien
tgccccaggcctgctgtgtgaccttagtcatgtagcttaccctctctgggcaacttttctttctccatctataaaatgaaggggttagactgggtcaacactgagcctccccctgagtctgagtctttgttgtctgtagatctgcctgatttggggtggctctgctggtactcccacttcctgctccatatctacctccccttggtatcccacattgtctcctgcatgtcttgttgccccagggccctgactggtactcctataattaactcctgcccatgctcaggacatggagggcctgcttggcttggccagacccagtggcctgttggggcccgggccccaccctcacggactggccagcgttcccaaccccagggccagggcaaggcgtctgctcccacagtggctacctccagccggcccagcacattcctcaggcttatctggaggcccgccccactggactctgccctcccacccaggaagcagcacccagagctgcgtgcggaagagttgcagggcctgggaacaggccctgcgtgagctcgaggtagtgattcttagcctggggctggagagaaacaggtagaggaccgggtggggcaggaggg

SEQ ID NO: 159 - DNA, 258 bp, Homo sapien
gtgagattgaaagtcagcaaatgcaaactcattttattggaagcggttgagaggccgtgagcggtggtagtaacaggatgaataaactcagcctctgccttcttcctgtagctgggacagccatgaaagcctccagtccaaatgcaaaggcaagtgggtaggacaggccttctgtggtcctcagtcagcctccttccttggccactcctgccattgtgcagtggactcctgggcagaggccttctcagtaaggcagga

SEQ ID NO: 160 - DNA, 259 bp, Homo sapien
gtgagattgaaagtcagcaaatgcaaactcattttattggaagcggttgagatgccgtgagcggtggtagtaacaggatgaataaactcagcctctgccttcttcctgtagctgggacagccatgaaagcctccagtccaaatgcaaaggcaagtgggtaggacaggccttctgtggtcctcagtcagcctccttccttggccactcctgccattgtgcagtggactcctgggcagaggccttctcagtaaggcaggag

SEQ ID NO: 161 - DNA, 148 bp, Homo sapien
ggttgagatgccgtgagcggtggtagtaacaggatagaatcaacattcagacctctgacttcttcctgtagctgggacagaccatgacagcctccagtccaaatgcaaagtggcaagtgggataggacagagccgttctgtggtcctc

SEQ ID NO: 162 - DNA, 337 bp, Homo sapien
catacagtagcagtaattgaaaggatatttcatttatatagcatctgtcagcctgaagtactttcagagtcttcacaaacaggaactgctttccttctcagaaaaaaatgctgctaagttgaagatggaactgaggcaggctccaggaaccctaactaaatacaaaactgaatgaactattgtggtaaatgggagcaggcgctcttcattttatgagatagatgaattactgaaaaaaatacacagacatggagtttcttggggaagtcaattaaaaacaaaatcccagtactgtagtagttggtcatttaaaagaaaattgttggccgggcgcggt

SEQ ID NO: 163 - DNA, 337 bp, Homo sapien; identical to SEQ ID NO: 162

SEQ ID NO: 164 - DNA, 720 bp, Homo sapien
cactataaattcagcaatcaaaagctgaacaggcagggcaaggtcaggtgctgttaggcagcatgcttcctggacgaggcaggatccccttggaggccaacttcctagaggaaggagacacctgtctctctgtggtagacccacagcactcttcagatgcccactggtcccctggcctttactttctagtctaggagactgaggctcaaaggaaagaaatggcctgcctgcagccatccacggaagatgcaaaagagaccacaaatagagtccaggtgcctgggccctcttttgccccaaggcctcctccccacagaaggtcccatggatcacttccccttgaacgccagcactaggactgcctgggtagctgatatagatggagacgcacaatcctcttggcccagatggggaactgagccgcaagcagtggctcggcagccactaaggccgaggtttagaaaagtaccactcttgccaagaaggaatgtgagggaaaggccaggaggctgggcgatgctggtggtgtgactttgagctggcgtcgtggtttgtggcgtcctcagaccaagcagcggcagcacggcacaaaggttggggcatggcttcttcacacccagctcctccactcacatgtgctgcaaccccgggcaagccgcttgcctccctgaacctcagttttctcatccataaaatgaggtttaggatcataagactgcc

SEQ ID NO: 165 - DNA, 800 bp, Homo sapien
cactataaattcagcaatcaaaagctgaacaggcagggcaaggtcaggtgctgttaggcagcatgcttcctggacgaggcaggatccccttggaggccaacttcctagaggaaggagacacctgtctctctgtggtagacccacagcactcttcagatgcccactggtcccctggcctttactttctagtctaggagactgaggctcaaaggaaagaaatggcctgcctgcagccatccacggaagatgcaaaagagaccacaaatagagtccaggtgcctgggccctcttttgccccaaggcctcctccccacagaaggtcccatggatcacttccccttgaacgccagcactaggactgcctgggtagctgatatagatggagacgcacaatcctcttggcccagatggggaactgagccgcaagcagtggctcggcagccactaaggccgaggtttagaaaagtaccactcttgccaagaaggaatgtgagggaaaggccaggaggctgggcgatgctggtggtgtgactttgagctggcgtcgtggtttgtggcgtcctcagaccaagcagcggcagcacggcacaaaggttggggcatggcttcttcacacccagctcctccactcacatgtgctgcaaccccgggcaagccgcttgcctccctgaacctcagttttctcatccataaaatgaggtttaggatcataagactgccttggctgggcgtagtggctcacgcctgtaatcccagccattcgggagtttgaggcaggagaatggcgtgaacccgggagg

SEQ ID NO: 166 - DNA, 781 bp, Homo sapien
aaaagctgaacaggcagggcaaggtcaggtgctgttaggcagcatgcttcctggacgaggcaggatccccttggaggccaacttcctagaggaaggagacacctgtctctctgtggtagacccacagcactcttcagatgcccactggtcccctggcctttactttctagtctaggagactgaggctcaaaggaaagaaatggcctgcctgcagccatccacggaagatgcaaaagagaccacaaatagagtccaggtgcctgggccctcttttgccccaaggcctcctccccacagaaggtcccatggatcacttccccttgaacgccagcactaggactgcctgggtagctgatatagatggagacgcacaatcctcttggcccagatggggaactgagccgcaagcagtggctcggcagccactaaggccgaggtttagaaaagtaccactcttgccaagaaggaatgtgagggaaaggccaggaggctgggcgatgctggtggtgtgactttgagctggcgtcgtggtttgtggcgtcctcagaccaagcagcggcagcacggcacaaaggttggggcatggcttcttcacacccagctcctccactcacatgtgctgcaaccccgggcaagccgcttgcctccctgaacctcagttttctcatccataaaatgaggtttaggatcataagactgccttggctgggcgtagtggctcacgcctgtaatcccagccattcgggagtttgaggcaggagaatggcgtgaacccgggagg

SEQ ID NO: 167 - DNA, 1095 bp, Homo sapien
tggaatcacctggtattctagctgagcctcatcactgcctgccctcttctgacctcaggggtctttggatagtcagccacatctatggtctccaaggcccctttctcatcgccgctgctatgggagcctcaatgagagaaccagggattctgtacatcatgtagccctggatctggcgctggtgctccgtctctaaggcccttgtcctgtctcaggcaggggctcacttcgacatcgctccctccctcatttcttgcctgctacagccaagggagccaatgatctcccggagcaaaaactcagcctcccgctgcttttccctcattgaagcaggtgtaaattaggaggaaatggatctgtctaagtttttggtccaaccccaataaaaagctcatccaactgttgtttatgagccccaagcctggagggagaggccgtgatttctaattactgaacaatgagcctttgatcagactaataaagagtcatttccaagttatgtagttgggctcccagggactgggagtcagaagactcgtttgataattttttttattgtgttaatgagcagatggatggagcttcaggctagcagataattcacagggaataatcccatttaccctgtgtgtgacagagatgtgttccaagatgggacgatgtgttgtcgcccagctggtggcagggtaagctgtggcttcaagccctctctcctctccatttttgttcatttgtttgccaccatccatccctatgaccgactggcaaaggacacaggcttcatccagtactagccatgtggccttgggaaggtcactttccccctggggtcctcatctatgaaatgatgatgatgattatagtagtcaattcctgggactgctataatgactgcattgggtaatctatgtggaaggatttatttagccaaatggggattccatatttattggctgggtgtgcttactaagcacctcctatttgccaggctttggggtcctcatggggagaaatacatggagcatgggctccattcctgatcctgcttttaagagtgatacttcctctccctctccctctccctctccctctccc

SEQ ID NO: 168 - DNA, 1423 bp, Homo sapien
  misc_feature (246)..(328): n=a,c,g or t
gaggtcacagctggatctgcttgttgcatttccagctgtgcagcacgttcaagagattcttgaagaatgaagacatttctgctctcagctccgggggtgaggtgtgcctggcctctgcctccaccctcctcctcttcaccaggtgcatgcatgccctctctgagtctggactttgcttcccctccaggagggaccaccctccctgactggcctgggatatctttacaagcaggcactgtatttttnnnnnnnnnnnnnnnnnnnnnnnnnnnnnnnnnnnnnnnnnnnnnnnnnnnnnnnnnnnnnnnnnnnnnnnnnnnnnnnnnnntggaatcacctggtattctagctgagcctcatcactgcctgccctcttctgacctcaggggtctttggatagtcagccacatctatggtctccaaggcccctttctcatcgccgctgctatgggagcctcaatgagagaaccagggattctgtacatcatgtagccctggatctggcgctggtgctccgtctctaaggcccttgtcctgtctcaggcaggggctcacttcgacatcgctccctccctcatttcttgcctgctacagccaagggagccaatgatctcccggagcaaaaactcagcctcccgctgcttttccctcattgaagcaggtgtaaattaggaggaaatggatctgtctaagtttttggtccaaccccaataaaaagctcatccaactgttgtttatgagccccaagcctggagggagaggccgtgatttctaattactgaacaatgagcctttgatcagactaataaagagtcatttccaagttatgtagttgggctcccagggactgggagtcagaagactcgtttgataattttttttattgtgttaatgagcagatggatggagcttcaggctagcagataattcacagggaataatcccatttaccctgtgtgtgacagagatgtgttccaagatgggacgatgtgttgtcgcccagctggtggcagggtaagctgtggcttcaagccctctctcctctccatttttgttcatttgtttgccaccatccatccctatgaccgactggcaaaggacacaggcttcatccagtactagccatgtggccttgggaaggtcactttccccctggggtcctcatctatgaaatgatgatgatgattatagtagtcaattcctgggactgctataatgactgcattgggtaatctatgtggaaggatttatttagccaaatggggattccatatttattggctgggtgtgcttactaagcacctcctatttgccaggctttggggtcctcatggggagaaatacatggagcatgggctccattcctgatcctgcttttaagagtgatacttcctctccctctccctctccctctccctctccc

SEQ ID NO: 169 - DNA, 1033 bp, Homo sapien
ctttggatagtcagccacatctatggtctccaaggcccctttctcatcgccgctgctatgggagcctcaatgagagaaccagggattctgtacatcatgtagccctggatctggcgctggtgctccgtctctaaggcccttgtcctgtctcaggcaggggctcacttcgacatcgctccctccctcatttcttgcctgctacagccaagggagccaatgatctcccggagcaaaaactcagcctcccgctgcttttccctcattgaagcaggtgtaaattaggaggaaatggatctgtctaagtttttggtccaaccccaataaaaagctcatccaactgttgtttatgagccccaagcctggagggagaggccgtgatttctaattactgaacaatgagcctttgatcagactaataaagagtcatttccaagttatgtagttgggctcccagggactgggagtcagaagactcgtttgataattttttttattgtgttaatgagcagatggatggagcttcaggctagcagataattcacagggaataatcccatttaccctgtgtgtgacagagatgtgttccaagatgggacgatgtgttgtcgcccagctggtggcagggtaagctgtggcttcaagccctctctcctctccatttttgttcatttgtttgccaccatccatccctatgaccgactggcaaaggacacaggcttcatccagtactagccatgtggccttgggaaggtcactttccccctggggtcctcatctatgaaatgatgatgatgattatagtagtcaattcctgggactgctataatgactgcattgggtaatctatgtggaaggatttatttagccaaatggggattccatatttattggctgggtgtgcttactaagcacctcctatttgccaggctttggggtcctcatggggagaaatacatggagcatgggctccattcctgatcctgcttttaagagtgatacttcctctccctctccctctccctctccctctccc

SEQ ID NO: 170 - DNA, 524 bp, Homo sapien
gacctcacagggacttagaaagacttcaacttgctaagctccaaggaaaacaaaaggcattctatttcttgtttgaaatttcatccttgggatatggaacacaattaccaacagggagtaggcatggagaaactcaaacttcccatgtttttccagtcaaataataatccatcccttgccatctcctggactctaaatgtttcaaagtacaatatgaaaaagaaaaatctgagccaccacgcccagccaaccccttggtgtattgacttgctgagtgcatcaggcaatggttgtggacacaatgtggtctcatgggagagctcctgtatacaaggtatagtaatgagggagcgtctggttaacaggattggcgttcaccttccttggcattcctaatctttgtagtgagacatgtttttttttgagatttcaagatacataaaaatctcctgggaaacttcaaaattgagtcatttatttccgaaatacccattgaggtagagctcctagtccctttgagaagc

SEQ ID NO: 171 - DNA, 524 bp, Homo sapien
gcttctcaaagggactaggagctctacctcaatgggtatttcggaaataaatgactcaattttgaagtttcccagggagatttttatgtatcttgaaatctcaaaaaaaaacatgtctcactacaaagattaggaatgccaaggaaggtgaacgccaatcctgttaaccagacgctccctcattactataccttgtatacaggagctctcccatgagaccacattgtgtccacaaccattgcctgatgcactcagcaagtcaatacaccaaggggttggctgggcgtggtggctcagatttttctttttcatattgtactttgaaacatttagagtccagggagatggcaagggatggattattatttgactggaaaaacatgggaagtttgagtttctccatgcctactccctgttggtaattgtgttccatatcccaaggatgaaatttcaaacaagaaatagaatgccttttgttttccttggagcttagcaagttgaagtcttctaagtcctgtgaggtc

SEQ ID NO: 172 - DNA, 934 bp, Homo sapien
tgtttgcttttatgaattggaggactgcctgggcccagggaagccgctattcatctgcctaagctgtagctgttggatgacacaggatcctcatctcaagttgctttgaggacaagaccactttcttgggcccctctgcacgtgggcagtccttccatgatgacagctgccctgttatggtgggattactttggagggtggatgtggcccagggaagtgtgtactctcagtgggcaggccttctgttttgatcattttgtagcccagcatctaacacaaggtgctcgtgactcaagaccttatgtaaagagggagggatgaacacaaggaagaaagttccccagaaatccttccttacacctgaaccgattccttcctatatgtcctcagcttgagtcattttctgtagctccctcttatttccatcagatacttggatacattttaaattgtatcccccaaatatcagtgagagaaatcacatccatgatctacactgcattgaccaggccatccagacagagagcggggatggcttgtctcccagggcagtggtgccacgtgccagcctagaggtttcggtttacctgcatgcaccacggtcccttgagaatctgtgcccttcccctcctggtaggggatgcttggaaagggtcaatctgaggcccttgctttcatgaaaggccttgaggcccacagccaggcttctagaaatctagaattgaccctggtttccagaatgaccagtttgcatttcctttatctgcacaaagaagcggatttcttgggggtcttctgggtgtgagcgtagtgagtgtgaatgcatcaaggtgcctaaaaatacaaggacagatgccaaatataagcatttttaccttgaagctgccttgaattgagtttcgcaggaaaagtgtattaaaataattcttaaaaa

SEQ ID NO: 173 - DNA, 1129 bp, Homo sapien
agtttttaagaattattttaatacacttttcctgcgaaactcaattcaaggcagcttcaaggtaaaaatgcttatatttggcatctgtccttgtatttttaggcaccttgatgcattcacactcactacgctcacacccagaagacccccaagaaatccgcttctttgtgcagataaaggaaatgcaaactggtcattctggaaaccagggtcaattctagatttctagaagcctggctgtgggcctcaaggcctttcatgaaagcaagggcctcagattgaccctttccaagcatcccctaccaggaggggaagggcacagattctcaagggaccgtggtgcatgcaggtaaaccgaaacctctaggctggcacgtggcaccactgccctgggagacaagccatccccgctctctgtctggatggcctggtcaatgcagtgtagatcatggatgtgatttctctcactgatatttgggggatacaatttaaaatgtatccaagtatctgatggaaataagagggagctacagaaaatgactcaagctgaggacatataggaaggaatcggttcaggtgtaaggaaggatttctggggaactttcttccttgtgttcatccctccctctttacataaggtcttgagtcacgagcaccttgtgttagatgctgggctacaaaatgatcaaaacagaaggcctgcccactgagagtacacacttccctgggccacatccaccctccaaagtaatcccaccataacagggcagctgtcatcatggaaggactgcccacgtgcagaggggcccaagaaagtggtcttgtcctcaaagcaacttgagatgaggatcctgtgtcatccaacagctacagcttaggcagatgaatagcggcttccctgggcccaggcagtcctccaattcataaaagcaaacaggcctggggcagtggctcacgctgtaatcccagcactttgggaggcctaggcaggcggatcacaaggtcaggagtttgagaccagcctggccaacatggtgaaaccccgtctgtactaaaaaaaatacaaaaattagccgggcatggtagcatgcgcctgtaatcccagctactcaggaggttgaggcaggag

SEQ ID NO: 174 - DNA, 96 bp, Homo sapien
tgtggaggaacccacagatgtgaattcaaacaactgcagttcaaaaatatttagagaaagacaataaaagtaataaaaaataccatattacaacta

SEQ ID NO: 175 - DNA, 96 bp, Homo sapien
catggaggaacccacagatgtgaattcaaacaactgcagttcaaaaatatttagagaaagacaataaaagtaataaaaaataccatattacaacta

SEQ ID NO: 176 - DNA, 780 bp, Homo sapien
agccaagtgagacagggacccatccacatcccccttagagatcaaacaattgtgtctcgaagcagcaaacctccttctcagccatcacctgctgggcatgttctgggtgagcctggggaagatgatatgtgccccatcgttaaaagtgaaagaacgtgcatctcaggggctccacagagcacccagagtccagtgctgcagaggcaggatgggcccaggcccctcaagcccattcttctcttggctcctgttccatctcggcagtgcttcctccagggaggatgtgggatttgatacgtgggaatgacagggtttggcaatcccatagcttctgaattccagggaggggaggagaaagatgcgggtgaaaacctgctttcagagggttttcccttggctgcctcctcaaccaaactcacccacaaattgcatgtcaagtttcccaacctccacctaggggagcaggctctttcacttcagagaattcagaggcatctcgagggcatatgccagggcaggcacagagtgaggaggtggggttgggggtttttggacagctctggtcccctccagccccacagagcatgcaatgtggctgatgctgctggagagctggtctctgaaaggagaatgcatgaatctgaactagaaacagaagggcagaaggaccaggaaaagaaatgagagccaaacagagtctgagcaatgaaaggatgtttcagagagctgaaaacacaagctaagctaagcatcagtggactgggagagctctgcaaaata

SEQ ID NO: 177 - DNA, 839 bp, Homo sapien
cctcacctggcgtttgtatagctccttctagcccccttatctcattccagctgcatgacagccaagtgagacagggacccatccacatcccccttagagatcaaacaattgtgtctcgaagcagcaaacctccttctcagccatcacctgctgggcatgttctgggtgagcctggggaagatgatatgtgccccatcgttaaaagtgaaagaacgtgcatctcaggggctccacagagcacccagagtccagtgctgcagaggcaggatgggcccaggcccctcaagcccattcttctcttggctcctgttccatctcggcagtgcttcctccagggaggatgtgggatttgatacgtgggaatgacagggtttggcaatcccatagcttctgaattccagggaggggaggagaaagatgcgggtgaaaacctgctttcagagggttttcccttggctgcctcctcaaccaaactcacccacaaattgcatgtcaagtttcccaacctccacctaggggagcaggctctttcacttcagagaattcagaggcatctcgagggcatatgccagggcaggcacagagtgaggaggtggggttgggggtttttggacagctctggtcccctccagccccacagagcatgcaatgtggctgatgctgctggagagctggtctctgaaaggagaatgcatgaatctgaactagaaacagaagggcagaaggaccaggaaaagaaatgagagccaaacagagtctgagcaatgaaaggatgtttcagagagctgaaaacacaagctaagctaagcatcagtggactgggagagctctgcaaaata

SEQ ID NO: 178 - DNA, 646 bp, Homo sapien
tgccccatcgtaaagtgaagaacggcatctcagggctccacagagcacccagagtccagtgctgcagaggcaggatgggcccaggcccctcaagcccattcttctcttggctcctgttccatctcggcagtgcttcctccagggaggatgtgggatttgatacgtgggaatgacagggtttggcaatcccatagcttctgaattccagggaggggaggagaaagatgcgggtgaaaacctgctttcagagggttttcccttggctgcctcctcaaccaaactcacccacaaattgcatgtcaagtttcccaacctccacctaggggagcaggctctttcacttcagagaattcagaggcatctcgagggcatatgccagggcaggcacagagtgaggaggtggggttgggggtttttggacagctctggtcccctccagccccacagagcatgcaatgtggctgatgctgctggagagctggtctctgaaaggagaatgcatgaatctgaactagaaacagaagggcagaaggaccaggaaaagaaatgagagccaaacagagtctgagcaatgaaaggatgtttcagagagctgaaaacacaagctaagctaagcatcagtggactgggagagctctgcaaaata

SEQ ID NO: 179 - DNA, 521 bp, Homo sapien
cctcacctggcgtttgtatagctccttctagcccccttatctcattccagctgcatgacagccaagtgagacagggacccatccacatcccccttagagatcaaacaattgtgtctcgaagcagcaaacctccttctcagccatcacctgctgggcatgttctgggtgagcctggggaagatgatatgtgccccatcgtaaagtgaaagaactgcatctcagggctccacagagcacccagagtccagtgctgcagaggcaggatggcccaggcccctcaagcccattcttctcttggctcctgttccatctcggcagtgcttcctccagggaggatgtgggatttgatacgtgggaatgacagggtttggcaatcccatagcttctgaattccagggaggggaggagaaagatgcgggtgaaaacctgctttcagagggttttcccttggctgcctcctcaaccaaactcacccacaaattgcatgtcaagtttcccaacctccacctaggggagcaggc

SEQ ID NO: 180 - DNA, 215 bp, Homo sapien
aaaagtgattacatgggtttattcttggtagagaaggtgttgtaaccacgggggcaaagccctaatactatggattagctacaagatcccagtaatagctttggattcaaaatcttcctttgcgaggctcttctcactaatgcagtttcatttgggctaaaattcaggggatctgagttcctgttcgactgtgcaatttaccagctacatggacc

SEQ ID NO: 181 - DNA, 215 bp, Homo sapien
aaaagtgattacatgggtttattcttggtagagaatgtgttgtaaccacatgggcaaagccctaatactatggattagctacaagatcccagtaatagctttggattcaaaatcttcctttgcgaggctcttctcactaatgcagtttcatttggtctaaaattcaggggatctgagttcctgttcgactgtgcaatttaccagctacatggacc

SEQ ID NO: 182 - DNA, 858 bp, Homo sapien
ttagaaaaagtgtctcacattcccgttcaggggcccaagcatctgcctcctctcctgcacagagggtctgggcttctcggggcctgtaagttggctaagcccctcatcggaccactggtctgctgctttctgggcagtggcctagaacttcaaggctgatgagcatatgcagaaggcaggaggacacagtctggctggcttgggcctcactagctgacagaggggctgcccagcctgaccacaggggtttcatggcagggactccagaccactcactcatcctatctgacttcacacaccacctggcttctgctcagagctgccattgtgccttccctgacatgagtgcagctgggacacacaccagggaaaggctcttgtctcctgccaagtccacaggggagaaagcgttacctccagggaaacagaggcagccgtgctctgtcactaccaatttgtacaaggcacagggcctaattgttgactttctacagcaagtctcctgtgtgagaccaggacctcttcccagcattctaaatgcaagacatctcaacagcccagcatgtcagagtggcatcccgtaggatgtctgctttctctcatcagtcctggagtcgcacctcagagaatgcctgtgagcagcatccgacagagactaccaacaaactggcccaggcatctggcaccagagaaaaatgaactcccagtagacagttccaccacgtgacattttcatgattgacagccctctcccactttccctagcctggcttacatgttgagaaggtaggattccccattacgagaggaggtggtctctgagcaaccacagtgatgtttccattctggagacttacc

SEQ ID NO: 183 - DNA, 857 bp, Homo sapien
ttagaaaaagtgtctcacattcccgttcaggggcccagcatctgcctcctctcctgcacagagggtctgggcttctcggggcctgtaagttggctaagcccctcatcggaccactggtctgctgctttctgggcagtggcctagaacttcaaggctgatgagcatatgcagaaggcaggaggacacagtctggctggcttgggcctcactagctgacagaggggctgcccagcctgaccacaggggtttcatggcagggactccagaccactcactcatcctatctgacttcacacaccacctggcttctgctcagagctgccattgtgccttccctgacatgagtgcagctgggacacacaccagggaaaggctcttgtctcctgccaagtccacaggggagaaagcgttacctccagggaaacagaggcagccgtgctctgtcactaccaatttgtacaaggcacagggcctaattgttgactttctacagcaagtctcctgtgtgagaccaggacctcttcccagcattctaaatgcaagacatctcaacagcccagcatgtcagagtggcatcccgtaggatgtctgctttctctcatcagtcctggagtcgcacctcagagaatgcctgtgagcagcatccgacagagactaccaacaaactggcccaggcatctggcaccagagaaaaatgaactcccagtagacagttccaccacgtgacattttcatgattgacagccctctcccactttccctagcctggcttacatgttgagaaggtaggattccccattacgagaggaggtggtctctgagcaaccacagtgatgtttccattctggagacttact

SEQ ID NO: 184 - DNA, 392 bp, Homo sapien
ggggattggggggcagtcagaaacggggcaggctcccaggctctgctcttgtgacggagcacctctgcaagagaagacgacacgggtctcatgtgctccaagggtgggaggtcacagaggagctggcagagaagagtcccaaaaatatccaaggcgtgtctcgatgagaccatctgaaggcggcgctttgctccctacgccggggacagcgcccgccaacactgtggcctccacagcctgacaaagctgtgagctgcgtgggaagccatcggccttggccatggccatgcacctgcagcccaaatggagacagtttctcctctgcatctcatcacagatgttaccctggttcctgcactgattcaaatacatctatggcttttattttattt

SEQ ID NO: 185 - DNA, 392 bp, Homo sapien; identical to SEQ ID NO: 184

SEQ ID NO: 186 - DNA, 632 bp, Homo sapien
ttaagtagaaacttgacttttaatctagcttctacacacaaggcttgggaagttgcttattcaacaatttaacaaaaattaacgatgtaattccaatcaaatctaaacctctagccacaaaaccttaaattcaaggtgctgatcttaatctaaaaaacctcatgtggtttgggttctggttaccttagagatttgactctaagcacccaaaggcaattaagattagatgaaatacttggccgatggttcactactgaaacctgatgaactggaatcctctgattttaattgcctttgggtgcttagagtcaaatctctaaggtaaccagaacccaaaccacatgaggttttttagattaagatcagcaccttgaatttaaggttttgtggctagaggtttagatttgattggaattacatcgttaatttttgttaaattgttgaataagcaacttcccaagccttgtgtgtagaagctagattaaaagtcaagtttctacttaaccagaatctctgttttgagtttttaaattcaactggtgatgtctaaatcttaaggatattgtaagttccttaactagtctgttccattttcctgagttttcacatcacctctctacctcttgtgtaga

SEQ ID NO: 187 - DNA, 457 bp, Homo sapien
accccagaatggttggtcaccctatctgaaaagagacacacaaaatcagaggattccagttcatcaggtttcagtagtgaaccatcggccaagtatttcatctaatcttaattgcctttgggtgcttagagtcaaatctctaaggtaaccagaacccaaaccacatgaggttttttagattaagatcagcaccttgaatttaaggttttgtggctagaggtttagatttgattggaattacatcgttaatttttgttaaattgttgaataagcaacttcccaagccttgtgtgtagaagctagattaaaagtcaagtttctacttaaccagaatctctgttttgagtttttaaattcaactggtgatgtctaaatcttaaggatattgtaagttccttaactagtctgttccattttcctgagttttcacatcacctctctacctcttgtgtagatt

SEQ ID NO: 188 - DNA, 680 bp, Homo sapien
ggctacattacacggtgaatcccgtcttactaaaaagacaaaaaattagctgggtgtggttgcaggcgcctgcagtcccagctactcaggaggttgaggcaggagaatcgctttaacccaggaggtagagcttgcagtgacccaagattgtcccaatgcactgcacgcctgggtgacagaactgagattgtgtgtactgaaattacaaacaatcaaacaagacccgcagaaatggttggtcaccctatctgaaaagagacacacaaaatcagaggattccagttcatcaggtttcagtagtgaaccatcggccaagtatttcatctaatcttaattgcctttgggtgcttagagtcaaatctctaaggtaaccagaacccaaaccacatgaggttttttagattaagatcagcaccttgaatttaaggttttgtggctagaggtttagatttgattggaattacatcgttaatttttgttaaattgttgaataagcaacttcccaagccttgtgtgtagaagctagattaaaagtcaagtttctacttaaccagaatctctgttttgagtttttaaattcaactggtgatgtctaaatcttaaggatattgtaagttccttaactagtctgttccattttcctgagttttcacatcacctctctacctcttgtgtagatt

SEQ ID NO: 189 - DNA, 605 bp, Homo sapien
gcctgtaatcccagctgcttgggaggctgaggcaggagaatcgcttgaacccaggaggtagagcttgcagtgagccaagattgtgccaatgcactgcagcctgggtgacagactgagactgtgtctgaaaaacaaacaaacaaacaaaaccccagaatggttggtcaccctatctgaaaagagacacacaaaatcagaggattccagttcatcaggtttcagtagtgaaccatcggccaagtatttcatctaatcttaattgcctttgggtgcttagagtcaaatctctaaggtaaccagaacccaaaccacatgaggttttttagattaagatcagcaccttgaatttaaggttttgtggctagaggtttagatttgattggaattacatcgttaatttttgttaaattgttgaataagcaacttcccaagccttgtgtgtagaagctagattaaaagtcaagtttctacttaaccagaatctctgttttgagtttttaaattcaactggtgatgtctaaatcttaaggatattgtaagttccttaactagtctgttccattttcctgagttttcacatcacctctctacctcttgtgtagatt

SEQ ID NO: 190 - DNA, 445 bp, Homo sapien
agatttgactctaagcacccaaaggcattaagattagatgaaatacttggccgatggttcactactgaaacctgatgaactggaatcctctgattttaattgcctttgggtgcttagagtcaaatctctaaggtaaccagaacccaaaccacatgaggttttttagattaagatcagcaccttgaatttaaggttttgtggctagaggtttagatttgattggaattacatcgttaatttttgttaaattgttgaataagcaacttcccaagccttgtgtgtagaagctagattaaaagtcaagtttctacttaaccagaatctctgttttgagtttttaaattcaactggtgatgtctaaatcttaaggatattgtaagttccttaactagtctgttccattttcctgagttttcacatcacctctctacctcttgtgtagatt

SEQ ID NO: 191 - DNA, 578 bp, Homo sapien
aagctccattcctgaaggctgggacagcattaggggacaggagtaaggtgacaaagcagaaactcttccccaagagctgcctggcacgtcaagatgcaaaagcctaaaacctttgaccaagacactgggcagaggttttaggcttttgcatcttgacgtgggagatagagagcctgtgagggagaggcaccagagacggagacgctggcagggtgcttgatcaatagctttcaggaatcaggttgcagactcagatcaaaagctccattcctgaaggctgggacagcattaggggacaggagtaaggtgacaaagcagaaactcttccccaagagctgcctggcacccttcatttcagactccgaagaaaaagaaggtccccttctagtggggttgaagccccaggttcacagcagttctcagcatggtgccccagcagactggcctgggtatcgggagacacactgcaatgatctgtcacttaaaacacttgtggagtgacagtgttggaaaactgcttacctttttaaaaaatgttttaacttttaaataactaagtaaataaggctggagcacac

SEQ ID NO: 192 - DNA, 744 bp, Homo sapien
aggacctgaagctgggattacaagtgtccgccagtacacttggctaatttttgtagttttagtagagatggggtttaccatgttgggcaggctggtcttgaactcccgacctcaggtgatccgccagcctcggcttcccaaagtgctgggattacaggcaggagccactgtgtccagccttatttacttagttatttaaaagttaaaacattttttaaaaaggtaagcagttttccaacactgtcactccacaagtgttttaagtgacagatcattgcagtgtgtctcccgatacccaggccagtctgctggggcaccatgctgagaactgctgtgaacctggggcttcaaccccactagaaggggaccttctttttcttcggagtctgaaatgaagggtgccaggcagctcttggggaagagtttctgctttgtcaccttactcctgtcccctaatgctgtcccagccttcaggaatggagcttttgatctgagtctgcaacctgattcctgaaagctattgatcaagcaccctgccagcgtctccgtctctggtgcctctccctcacaggctctctatctcccacgtcaagatgcaaaagcctaaaacctctgcccagtgtcttggtcaaaggttttaggcttttgcatcttgacgtgccaggcagctcttggggaagagtttctgctttgtcaccttactcctgtcccctaatgctgtcccagccttcaggaatggagctt

SEQ ID NO: 193 - DNA, 742 bp, Homo sapien
aggacctgaagctgggattacaagtgtccgccagtacacttggctaatttttgtagttttagtagagatggggtttaccatgttgggcaggctggtcttgaactcccgacctcaggtgatccgccagcctcggcttcccaaagtgctgggattacaggcaggagccactgtgtccagcctatttacttagttatttaaaagtaaaacattttttaaaaaggtaagcagttttccaacactgtcactccacaagtgttttaagtgacagatcattgcagtgtgtctcccgatacccaggccagtctgctggggcaccatgctgagaactgctgtgaacctggggcttcaaccccactagaaggggaccttctttttcttcggagtctgaaatgaagggtgccaggcagctcttggggaagagtttctgctttgtcaccttactcctgtcccctaatgctgtcccagccttcaggaatggagcttttgatctgagtctgcaacctgattcctgaaagctattgatcaagcaccctgccagcgtctccgtctctggtgcctctccctcacaggctctctatctcccacgtcaagatgcaaaagcctaaaacctctgcccagtgtcttggtcaaaggttttaggcttttgcatcttgacgtgccaggcagctcttggggaagagtttctgctttgtcaccttactcctgtcccctaatgctgtcccagccttcaggaatggagctt

SEQ ID NO: 194 - DNA, 350 bp, Homo sapien
cttggaagttgtacttttggataaatatgccttcttggtaaagatcaagggtaacagggaagggaaagattccatgtaggactatggggaggggagaatgcatttgaagctctctctaagacatcagcagctcctttgggcaaagagaaactgccccgacagaaagaaacatttttgggtattagttaaacattgcctgaatatttggatcttgcttttttctctcctcctccaagaataagttttaatggcctgggtttacagatccacacgggacctaaggagggagcggttgtattgactttcacttgatttactaaagcaattgaatttgtcgggggaaatttgat

SEQ ID NO: 195 - DNA, 350 bp, Homo sapien
cttggaagttgtacttttggataaatatgccttcttggtaaagatcaagggtaacagggaagggaaagattccatgtaggactatggggaggggagaatgcatttgaagctctctctaagacatcagcagctcctttgggcaaagagaaactgccccgacagaaagaaacatttttgggtattagttaaacattgcctgaatatttggatcttgcttttttctctcctcctccaagaacaagttttagtggcctgggtttagagagccacacgggacctaaggagggaggggttgtattgactttcacttgatttactaaagcaattgagtttgtcgggggaaatgtgat

SEQ ID NO: 196 - DNA, 553 bp, Homo sapien
aaaagtttaaaacaacctgatgacccataagtaggaactggttaaataaattgtatctttcaccaggagatcctatgcatctttaaataagaatgaagaagtcgttttgtacatacacaaatgtggaatattatgtagctgtgttaaattttaaaaatcaaatgcagaagatctctgtgtactaataggaaaatatattttggacttttccagtgaaagaagcaaagtgcattggccgtgctagctcctgcttgactttctaatccctggggcccaatgctgtacttggttttggttttgtttattttgttttcttcttctgtcctttccaaacacgcacacttattggttctattgtttgcctaaccctttgatactatacccagcagctctcatctttccacctattcagacctgtggctgcccctgaccttgttacctatattgccaagacttctccatgctgccttcacttacagcacaatatggactatcctggcatgctagtgtcttttcttctaagctacatcttgggctcttagaaagaaatgca

SEQ ID NO: 197 - DNA, 554 bp, Homo sapien
aaaagttttaaaacaacctgatgacccataagtaggaactggttaaataaattgtatctttcactaggagatcctatgcatctttaaataagaatgaagaagtcgttttgtacatacacaaatgtggaatattatgtagctgtgttaaattttaaaaatcaaatgcagaagatctctgtgtactaataggaaaatatattttggacttttccagtgaaagaagcaaagtgcattggccgtgctagctcctgcttgactttctaatccctggggcccaatgctgtacttggttttggttttgtttattttgttttcttcttctgtcctttccaaacacgcacacttattggttctattgtttgcctaaccctttgatactatacccagcagctctcatctttccacctattcagacctgtggctgcccctgaccttgttacctatattgccaagacttctccatgctgccttcacttacagcacaatatggactatcctggcatgctagtgtcttttcttctaagcttcatcttgggctcttagaaagaaatgca

SEQ ID NO: 198 - DNA, 106 bp, Homo sapien
caagactctgtctcaaaaaaagaaaaaaagacccataaggcttttagaagaaaatacaggagaaaatctttggaacataagactacgtgaagaggctgggtgtggt

SEQ ID NO: 199 - DNA, 106 bp, Homo sapien; identical to SEQ ID NO: 198

SEQ ID NO: 200 - DNA, 104 bp, Homo sapien
caagactctgtctcaaaaaaagaaaaaaagacccataaggcttttagaagaaaatcaggagaaaatctttggaacataagactcgtgaagaggctgggtgtggt

SEQ ID NO: 201 - DNA, 719 bp, Homo sapien
  misc_feature (76)..(155): n=a,c,g or t
  misc_feature (620)..(620): n=a,c,g or t
ttgttcccaaaaaatgtttacaatggacatgtattttatgtgaactttttaaaaagttacttctattgtaagaaannnnnnnnnnnnnnnnnnnnnnnnnnnnnnnnnnnnnnnnnnnnnnnnnnnnnnnnnnnnnnnnnnnnnnnnnnnnnnnnagaagaaaacttgatagccttgatggatataaaaagaaaacttatctaattataagacatcccctattattgaatagaaagtcttagaattataaatacagcaattctgtcttcagttagtctataagtgtaatggttatattagaacagcccaagtttactgcagttacaaattaaccctgaaatccccctgtctgacgctgagtttcttgctcagtcatgccgcagttccattgtgggctgataggagtctctgtccgcatagaggtctagacccattcaggggtctagactctctgaggctgtgccatcttggagttacatcatctgaaagaagtaccacgctcagaggctgtggcaggaaaagaaggaggggagtcaaaatccagcaactaaatgttttggcctggaaacatcacatgacacttggctattggccagactaatcacataaccccacctgantgcagggaggcaaggaacttcagtctttcgtacgtgcaggaatcagaaaagatccagatactggtgaatactcgtgggtttcaataaaaataccattga

SEQ ID NO: 202 - DNA, 449 bp, Homo sapien
tgatggatataaaaagaaaacttatctaattataagacatcccctattattgaatagaaagtcttagaattataaatacagcaattctgtcttcagttagtctataagtgtaatggttatattagaacagcccaagtttactgcagttacaaattaaccctgaaatccccctgtctgacgctgagtttcttgctcagtcatgccgcagttccattgtgggctgataggagtctctgtccgcatagaggtctagacccattcaggggtctagactctctgaggctgtgccatcttggagttacatcatctgaaagaagtaccacgctcagaggctgtggcaggaaaagaaggaggggagtcaaaatccagcaactaaatgttttggcctggaaacatcacatgacacttggctattggccagactaatcacataaccccacctgaatgca

SEQ ID NO: 203 - DNA, 752 bp, Homo sapien
gcttccagaaggccatgggcggcagcatgggccctcctgggaaagtgtgaaaggccaaggccccaaaacaccacagggtgtagcagtgagggctggttcaggtgagaacagcggcatgaagttgcccaacttggggttggaaatcacagtttgggagcggctccaatccaaaccatgacaccatacgggatctttcagccacttgcaggggcggagctggcggcgggattgacctgggattggggattggcggggtggggagctggtggggtccggcggaaaggggaggacgtgaacttgggcgggttgccctggagaggcctgtagatgctgggcaggtgggaaggcaggtttccaggtggcagcgggtggagaggaggtgggggacttgtggtcagagagcgcccctggcggggatttggggatcagcatgcaggaagctctggtgatgacaccccaggggcgtgtgtgaaacggattcaggctgccaagcgttattcactgtggagagattgtcatcaccagagccgtgtctaaaggatttagccagggctggatacggaaaacagaatggaagggggctttgggagaccagcccacctcacaagaaagagctgagagcctagatttgggccagcgggggtagtctctggacggagggcggcacggggctggaggaggagcgttttatgatgcggccgtgggtgctggccttggctggggcttgtggcgactgggtgccgtgacgtggg

SEQ ID NO: 204 - DNA, 1024 bp, Homo sapien
cctgagtccccggcgctgtggtcccccgccccaggcttgtgcgcctcctgtctccgagtcgtcgtcggtgctgctgcccagcccccgcgcctcccgccgcttcttgcgccttgcggttgacggccgagatgaaggagatcgccagcatctcccgggcgtacggctccttcttgggggcccacgaaccctgtgtgggagacaggtcaggatgcggggggcgtcccggactcggcccctctgccgaccccgtcttctatctccggtcctacctctccacgtcacggcacccagtcgccacaagccccagccaaggccagcacccacggccgcatcataaaacgctcctcctccagccccgtgccgccctccgtccagagactacccccgctggcccaaatctaggctctcagctctttcttgtgaggtgggctggtctcccaaagcccccttccattctgttttccgtatccagccctggctaaatcctttagacacggctctggtgatgacaatctctccacagtgaataacgcttggcagcctgaatccgtttcacacacgcccctggggtgtcatcaccagagcttcctgcatgctgatccccaaatccccgccaggggcgctctctgaccacaagtcccccacctcctctccacccgctgccacctggaaacctgccttcccacctgcccagcatctacaggcctctccagggcaacccgcccaagttcacgtcctcccctttccgccggaccccaccagctccccaccccgccaatccccaatcccaggtcaatcccgccgccagctccgcccctgcaagtggctgaaagatcccgtatggtgtcatggtttggattggagccgctcccaaactgtgatttccaaccccaagttgggcaacttcatgccgctgttctcacctgaaccagccctcactgctacaccctgtggtgttttggggccttggcctttcacactttcccaggagggcccatgctgccgcccatggccttctggaagc

SEQ ID NO: 205 - DNA, 2981 bp, Homo sapien
cagactggagtgccagcaggccttgtcacactggctgtcaaaccaggtaccccgccgggcgggggagagacggtgcccagccatggccccccgggcccgcagcgcctcccaggaccggttggaggaggtggctgccccccgcccgtggccctgctccacctcccaggatgctttgagccagctgggccaggagggctggcaccgagctcgctcagatgactacttgagccgggccacccgttctgccgaggcactggggccaggggcactggtgtcaccccgctttgagcggtgtggctgggcttcccagcgttcgtctgcccgcacccccgcctgcccaactcgggacctgccagggccccaggccccaaccccgtctggcctgcagggcctggatgacctcgggtacatcggctaccggagctacagcccatcattccagcgaccggaccggcctcctccatgcgctctccttccgggactcaccctttggggggctgcctaccttcaacctggcccagtcccctgcgtcattcccaccagaggcctccgagccacccagggttgtacggccggaacccagcacccgggccctggagcctcctgcggaggatcgcggcgatgaggtggtcctgaggcagaagcccccgacgggccgcaaggttcagctgacccccgcaagacagatgaaccttggatttggtgacgagtccccagagccagaggccagtgggcgaggggaacgcctgggcaggaaggtggcccctttggccaccaccgaagactctctggcttccatcccctttattgatgagcccaccagccccagcattgacctccaagccaagcacgtccctgcctctgctgtggtctccagtgccatgaactcagcccctgtcctgggcaccagcccatcttccccgaccttcactttcaccctcggacgccattactcgcaggactgcagcagcatcaaggctggccgccgctcctcctacctgctggccatcaccacggagcgctccaagtcctgcgatgatggactcaacaccttccgcgacgagggccgggttctgcggcgcctgccaaaccgcatacccagcctgcggatgctccggagcttcttcaccgacgggtccttggatagctggggcacctctgaagatgctgacgctccttctaagcgacactcaacctctgacctctcagatgcgaccttcagcgatatcaggagagaaggctggttgtattataagcagattctcaccaagaaggggaagaaagcgggcagcggcctgcgccagtggaagcgggtgtacgccgcgctgcgggcgcgctcgctctcgctgagcaaggagcggcgggagcccgggccggcggcggcgggggctgcggcggccggcgcaggtgaggacgaggcggcgcccgtctgcatcggctcctgcctcgtggacatctcctacagcgagaccaagaggaggcacgtgttccggctgaccaccgctgacttctgtgaatatctctttcaggctgaggaccgggatgacatgctgggctggatcagagcgatccgggagaacagcagggccgagggcgaggaccccggctgtgccaaccaagctctgatcagcaagaagcttaatgattatcgcaaagtgagccatagctctgggcccaaagctgattcctcccccaaaggctctcgcggcctggggggcctcaagtctgagttcctcaagcagagtgcggcacgtggcctcaggactcaggacctgcccgcagggagcaaggatgacagtgctgcagcccccaaaaccccctggggcatcaacatcatcaagaaaaataagaaggccgctccgagggcgtttggggtcaggctggaggagtgccagccagccacggagaaccagcgcgtccccttaatcgtggctgcatgctgtcgcattgtggaggcacgagggctggagtccacaggcatttaccgagtgcccggcaacaatgcagtggtgtccagcctacaggagcagctcaaccgcgggcctggtgacatcaacctgcaggatgagcgctggcaagacctcaatgtgatcagcagcctgctcaagtccttcttccgaaagctgcccgagcctcttttcactgatgacaaatacaacgacttcatcgaggccaaccgcattgaggacgcgcgggagcgaatgaggacgctgcggaagctgatccgggatctcccaggacactactatgaaacgctcaaattccttgtgggccatctcaagaccatcgctgaccactctgagaaaaacaagatggaaccccggaacctggccctggtctttgggccgacactggtgaggacgtctgaggacaacatgacagacatggtgacccacatgcctgaccgctacaagatcgtggagacactgatccagcactcagactggttcttcagtgacgaagaggacaagggagagagaacccctgtgggcgacaaggagcctcaggcagtgcccaacattgagtacctcctgcccaacattggcaggacagtgccccctggcgacccggggtcagcggacctgttggagatttaaaggattctaccacctgtagttcagccaagtccaagggttcgtgggcccccaagaaggagccgtacgcccgggagatgctggcgatctccttcatctcggccgtcaaccgcaagcgcaagaagcggcgggaggcgcgggggctgggcagcagcaccgacgacgactcggagcaggaggcgcacaagcctggggcgggggccacagcgccggggactcaggagcggccgccggggagccgatgcccggcgccggcggccgatgccccgcgccgccgccaccgcggcccccggacccggcagtcccccggcggcgcgggaggggccgccggccgcggcgacgcgctccattgtgtcgggctaatccaacctgtcaccatggaccgga

SEQ ID NO: 206 - DNA, 608 bp, Homo sapien
ggatctcccmggcmctwctatgaacgctccaattccctgtgggaccctttctcmgaccwacgtcttccctttataagtagctgtggggctgctgctactctgtctcygtagtttttcctctccaaaaaataagaaggccgctccgagggcgtttggggtcaggctggaggagtgccagccagccacggagaaccagcgcgtccccttaatcgtggctgcatgctgtcgcattgtggaggcacgagggctggagtccacaggcatttaccgagtgcccggcaacaatgcagtggtgtccagcctacaggagcagctcaaccgcgggcctggtgacatcaacctgcaggatgagcgctggcaagacctcaatgtgatcagcagcctgctcaagtccttcttccgaaagctgcccgagcctcttttcactgatgacaaatacaacgacttcatcgaggccaaccgcattgaggacgcgcgggagcgaatgaggacgctgcggaagctgatccgggatctcccaggacactactatgaaacgctcaaattccttgtgggaccttttctcagacaacgtcttccttttataagtagctgtgggmtgctgctac

SEQ ID NO: 207 - DNA, 752 bp, Homo sapien; identical to SEQ ID NO: 203

SEQ ID NO: 208 - DNA, 991 bp, Homo sapien
gcttccagaaggccatgggcggcagcatgggccctcctgggaaagtgtgaaaggccaaggccccaaaacaccacagggtgtagcagtgagggctggttcaggtgagaacagcggcatgaagttgcccaacttggggttggaaatcacagtttgggagcggctccaatccaaaccatgacaccatacgggatctttcagccacttgcaggggcggagctggcggcgggattgacctgggattggggattggcggggtggggagctggtggggtccggcggaaaggggaggacgtgaacttgggcgggttgccctggagaggcctgtagatgctgggcaggtgggaaggcaggtttccaggtggcagcgggtggagaggaggtgggggacttgtggtcagagagcgcccctggcggggatttggggatcagcatgcaggaagctctggtgatgacaccccaggggcgtgtgtgaaacggattcaggctgccaagcgttattcactgtggagagattgtcatcaccagagccgtgtctaaaggatttagccagggctggatacggaaaacagaatggaagggggctttgggagaccagcccacctcacaagaaagagctgagagcctagatttgggccagcggggggttcgtgggcccccaagaaggagccgtacgcccgggagatgctggcgatctccttcatctcggccgtcaaccgcaagcgcaagaagcggcgggaggcgcgggggctgggcagcagcaccgacgacgactcggagcaggaggcgcacaagcctggggcgggggccacagcgccggggactcaggagcggccgccggggagccgatgcccggcgccggcggccgatgccccgcgccgccgccaccgcggcccccggacccggcagtcccccggcggcgcgggaggggccgccggccgcggcgacgcgctccattgtgtcgggctaatccaacctgtcaccatggaccgga

SEQ ID NO: 209 - DNA, 2958 bp, Homo sapien
cagactggagtgccagcaggccttgtcacactggctgtcaaaccaggtaccccgccgggcgggggagagacggtgcccagccatggccccccgggcccgcagcgcctcccaggaccggttggaggaggtggctgccccccgcccgtggccctgctccacctcccaggatgctttgagccagctgggccaggagggctggcaccgagctcgctcagatgactacttgagccgggccacccgttctgccgaggcactggggccaggggcactggtgtcaccccgctttgagcggtgtggctgggcttcccagcgttcgtctgcccgcacccccgcctgcccaactcgggacctgccagggccccaggccccaaccccgtctggcctgcagggcctggatgacctcgggtacatcggctaccggagctacagcccatcattccagcgaccggaccggcctcctccatgcgctctccttccgggactcaccctttggggggctgcctaccttcaacctggcccagtcccctgcgtcattcccaccagaggcctccgagccacccagggttgtacggccggaacccagcacccgggccctggagcctcctgcggaggatcgcggcgatgaggtggtcctgaggcagaagcccccgacgggccgcaaggttcagctgacccccgcaagacagatgaaccttggatttggtgacgagtccccagagccagaggccagtgggcgaggggaacgcctgggcaggaaggtggcccctttggccaccaccgaagactctctggcttccatcccctttattgatgagcccaccagccccagcattgacctccaagccaagcacgtccctgcctctgctgtggtctccagtgccatgaactcagcccctgtcctgggcaccagcccatcttccccgaccttcactttcaccctcggacgccattactcgcaggactgcagcagcatcaaggctggccgccgctcctcctacctgctggccatcaccacggagcgctccaagtcctgcgatgatggactcaacaccttccgcgacgagggccgggttctgcggcgcctgccaaaccgcatacccagcctgcggatgctccggagcttcttcaccgacgggtccttggatagctggggcacctctgaagatgctgacgctccttctaagcgacactcaacctctgacctctcagatgcgaccttcagcgatatcaggagagaaggctggttgtattataagcagattctcaccaagaaggggaagaaagcgggcagcggcctgcgccagtggaagcgggtgtacgccgcgctgcgggcgcgctcgctctcgctgagcaaggagcggcgggagcccgggccggcggcggcgggggctgcggcggccggcgcaggtgaggacgaggcggcgcccgtctgcatcggctcctgcctcgtggacatctcctacagcgagaccaagaggaggcacgtgttccggctgaccaccgctgacttctgtgaatatctctttcaggctgaggaccgggatgacatgctgggctggatcagagcgatccgggagaacagcagggccgagggcgaggaccccggctgtgccaaccaagctctgatcagcaagaagcttaatgattatcgcaaagtgagccatagctctgggcccaaagctgattcctcccccaaaggctctcgcggcctggggggcctcaagtctgagttcctcaagcagagtgcggcacgtggcctcaggactcaggacctgcccgcagggagcaaggatgacagtgctgcagcccccaaaaccccctggggcatcaacatcatcaagaaaaataagaaggccgctccgagggcgtttggggtcaggctggaggagtgccagccagccacggagaaccagcgcgtccccttaatcgtggctgcatgctgtcgcattgtggaggcacgagggctggagtccacaggcatttaccgagtgcccggcaacaatgcagtggtgtccagcctacaggagcagctcaaccgcgggcctggtgacatcaacctgcaggatgagcgctggcaagacctcaatgtgatcagcagcctgctcaagtccttcttccgaaagctgcccgagcctcttttcactgatgacaaatacaacgacttcatcgaggccaaccgcattgaggacgcgcgggagcgaatgaggacgctgcggaagctgatccgggatctcccaggacactactatgaaacgctcaaattccttgtgggccatctcaagaccatcgctgaccactctgagaaaaacaagatggaaccccggaacctggccctggtctttgggccgacactggtgaggacgtctgaggacaacatgacagacatggtgacccacatgcctgaccgctacaagatcgtggagacactgatccagcactcagactggttcttcagtgacgaagaggacaagggagagagaacccctgtgggcgacaaggagcctcaggcagtgcccaacattgagtacctcctgcccaacattggcaggacagtgccccctggcgacccggggtcagattctaccacctgtagttcagccaagtccaagggttcgtgggcccccaagaaggagccgtacgcccgggagatgctggcgatctccttcatctcggccgtcaaccgcaagcgcaagaagcggcgggaggcgcgggggctgggcagcagcaccgacgacgactcggagcaggaggcgcacaagcctggggcgggggccacagcgccggggactcaggagcggccgccggggagccgatgcccggcgccggcggccgatgccccgcgccgccgccaccgcggcccccggacccggcagtcccccggcggcgcgggaggggccgccggccgcggcgacgcgctccattgtgtcgggctaatccaacctgtcaccatggaccgga

SEQ ID NO: 210 - DNA, 4624 bp, Homo sapien
cagactggagtgccagcaggccttgtcacactggctgtcaaaccaggtaccccgccgggcgggggagagacggtgcccagccatggccccccgggcccgcagcgcctcccaggaccggttggaggaggtggctgccccccgcccgtggccctgctccacctcccaggatgctttgagccagctgggccaggagggctggcaccgagctcgctcagatgactacttgagccgggccacccgttctgccgaggcactggggccaggggcactggtgtcaccccgctttgagcggtgtggctgggcttcccagcgttcgtctgcccgcacccccgcctgcccaactcgggacctgccagggccccaggccccaaccccgtctggcctgcagggcctggatgacctcgggtacatcggctaccggagctacagcccatcattccagcgaccggaccggcctcctccatgcgctctccttccgggactcaccctttggggggctgcctaccttcaacctggcccagtcccctgcgtcattcccaccagaggcctccgagccacccagggttgtacggccggaacccagcacccgggccctggagcctcctgcggaggatcgcggcgatgaggtggtcctgaggcagaagcccccgacgggccgcaaggttcagctgacccccgcaagacagatgaaccttggatttggtgacgagtccccagagccagaggccagtgggcgaggggaacgcctgggcaggaaggtggcccctttggccaccaccgaagactctctggcttccatcccctttattgatgagcccaccagccccagcattgacctccaagccaagcacgtccctgcctctgctgtggtctccagtgccatgaactcagcccctgtcctgggcaccagcccatcttccccgaccttcactttcaccctcggacgccattactcgcaggactgcagcagcatcaaggctggccgccgctcctcctacctgctggccatcaccacggagcgctccaagtcctgcgatgatggactcaacaccttccgcgacgagggccgggttctgcggcgcctgccaaaccgcatacccagcctgcggatgctccggagcttcttcaccgacgggtccttggatagctggggcacctctgaagatgctgacgctccttctaagcgacactcaacctctgacctctcagatgcgaccttcagcgatatcaggagagaaggctggttgtattataagcagattctcaccaagaaggggaagaaagcgggcagcggcctgcgccagtggaagcgggtgtacgccgcgctgcgggcgcgctcgctctcgctgagcaaggagcggcgggagcccgggccggcggcggcgggggctgcggcggccggcgcaggtgaggacgaggcggcgcccgtctgcatcggctcctgcctcgtggacatctcctacagcgagaccaagaggaggcacgtgttccggctgaccaccgctgacttctgtgaatatctctttcaggctgaggaccgggatgacatgctgggctggatcagagcgatccgggagaacagcagggccgagggcgaggaccccggctgtgccaaccaagctctgatcagcaagaagcttaatgattatcgcaaagtgagccatagctctgggcccaaagctgattcctcccccaaaggctctcgcggcctggggggcctcaagtctgagttcctcaagcagagtgcggcacgtggcctcaggactcaggacctgcccgcagggagcaaggatgacagtgctgcagcccccaaaaccccctggggcatcaacatcatcaagaaaaataagaaggccgctccgagggcgtttggggtcaggctggaggagtgccagccagccacggagaaccagcgcgtccccttaatcgtggctgcatgctgtcgcattgtggaggcacgagggctggagtccacaggcatttaccgagtgcccggcaacaatgcagtggtgtccagcctacaggagcagctcaaccgcgggcctggtgacatcaacctgcaggatgagcgctggcaagacctcaatgtgatcagcagcctgctcaagtccttcttccgaaagctgcccgagcctcttttcactgatgacaaatacaacgacttcatcgaggccaaccgcattgaggacgcgcgggagcgaatgaggacgctgcggaagctgatccgggatctcccaggacactactatgaaacgctcaaattccttgtgggccatctcaagaccatcgctgaccactctgagaaaaacaagatggaaccccggaacctggccctggtctttgggccgacactggtgaggacgtctgaggacaacatgacagacatggtgacccacatgcctgaccgctacaagatcgtggagacactgatccagcactcagactggttcttcagtgacgaagaggacaagggagagagaacccctgtgggcgacaaggagcctcaggcagtgcccaacattgagtacctcctgcccaacattggcaggacagtgccccctggcgacccggggtcagcggacctgttggagatttaaagggtacagtgcggtgtcgcggcctcggtcactaacagtggcgggtgattataagaaggctgggtgggcacagcggcaggcagaatgtcccggactgtgaggaccccacgctgacatgccagttacccctgcctgttatccacttaccccagcagtccatgcccctcccattctaaagccccttctcaggaggaaggaggcactcactagggcccagggccctccccgttgcctggacacctgggcatcgaattgctgccctcctgcagtgccacagaccctgcggcctctctttgccgagtctcaccactgctagtcatccaggctggggaccgacactctctggagaccagcgatgccacgcccagaagcttctctttatctctaactcctgcctcagtcaccccaatgggccgcctcttcctgcttaagaaaccggggccctaagtcctgtttgcagggcctgtggccctctcatggcagaggacagatgatttacatgctcagagacagatgagggccactccctttgtggctgcagccactgactcctccccccgccatggttgtccctccctttagttttagcatttctgttcgtctctgacagaggcacacaggagctccctagtcaccagaggcaggctcaggaggggccagaagacatgggggtgggacggcagagagggaccccatgtctcttctaatcacccgccgccccccgcgccctgtgtgtcgtgtgtggtcgcccatcttgcttttctcaccttgtgcagggggaggggtccggagaggggggcgtctaacttgcctgccagagagtgtggattaaccgcacctgcccactaccctgtgggaccccaggaggcccttggaccaacctgctccctctttagccttggaggggacccaccaggacgtgtttctggttccttctccaccccagtgatattaagggagtgggacccaagtcccatagaaatcatgcttttagtctccttcataactgggtgataactggggaccctgcccatgaggcagggtgaccccaggtccggaggtggaacctatcaaggctctaatcaccagcccactccacctcctgcgtcccacccacttcatttttgcccttttatccattattcatgtggtccctcttctctgttgtgtgctcgggggtggatgtagggcacccacctctctgtgcactgtgtggtctccatttctccagagcatctgtgatttgctgtgtttcactgtggtggtttccatggactgcacctgatatttggcattttctctccagtgcttcagagtaacagggacgggcggggaaggggagaggaaccaggctcaaagacaatgcccccttgcccttagccatcggtaaatgaggggccagtggctggcagcctgatgtcacttcctgcctctagaggaagtggcagttaacatcattttctcctccatccctctcccatagatggacatcagatgtccatcatactcctagggcctggggagatctcatgtttcagaattccctggtttctgaagcctttgaggagagggaattgtgtgcataagactcagctttcttttttcctgatgcaactttcatttttttttctgtctttcaccaacagattctaccacctgtagttcagccaagtccaagggttcgtgggcccccaagaaggagccgtacgcccgggagatgctggcgatctccttcatctcggccgtcaaccgcaagcgcaagaagcggcgggaggcgcgggggctgggcagcagcaccgacgacgactcggagcaggaggcgcacaagcctggggcgggggccacagcgccggggactcaggagcggccgccggggagccgatgcccggcgccggcggccgatgccccgcgccgccgccaccgcggcccccggacccggcagtcccccggcggcgcgggaggggccgccggccgcggcgacgcgctccattgtgtcgggctaatccaacctgtcaccatggaccgga

SEQ ID NO: 211 - DNA, 4852 bp, Homo sapien
cagactggagtgccagcaggccttgtcacactggctgtcaaaccaggtaccccgccgggcgggggagagacggtgcccagccatggccccccgggcccgcagcgcctcccaggaccggttggaggaggtggctgccccccgcccgtggccctgctccacctcccaggatgctttgagccagctgggccaggagggctggcaccgagctcgctcagatgactacttgagccgggccacccgttctgccgaggcactggggccaggggcactggtgtcaccccgctttgagcggtgtggctgggcttcccagcgttcgtctgcccgcacccccgcctgcccaactcgggacctgccagggccccaggccccaaccccgtctggcctgcagggcctggatgacctcgggtacatcggctaccggagctacagcccatcattccagcgaccggaccggcctcctccatgcgctctccttccgggactcaccctttggggggctgcctaccttcaacctggcccagtcccctgcgtcattcccaccagaggcctccgagccacccagggttgtacggccggaacccagcacccgggccctggagcctcctgcggaggatcgcggcgatgaggtggtcctgaggcagaagcccccgacgggccgcaaggttcagctgacccccgcaagacagatgaaccttggatttggtgacgagtccccagagccagaggccagtgggcgaggggaacgcctgggcaggaaggtggcccctttggccaccaccgaagactctctggcttccatcccctttattgatgagcccaccagccccagcattgacctccaagccaagcacgtccctgcctctgctgtggtctccagtgccatgaactcagcccctgtcctgggcaccagcccatcttccccgaccttcactttcaccctcggacgccattactcgcaggactgcagcagcatcaaggctggccgccgctcctcctacctgctggccatcaccacggagcgctccaagtcctgcgatgatggactcaacaccttccgcgacgagggccgggttctgcggcgcctgccaaaccgcatacccagcctgcggatgctccggagcttcttcaccgacgggtccttggatagctggggcacctctgaagatgctgacgctccttctaagcgacactcaacctctgacctctcagatgcgaccttcagcgatatcaggagagaaggctggttgtattataagcagattctcaccaagaaggggaagaaagcgggcagcggcctgcgccagtggaagcgggtgtacgccgcgctgcgggcgcgctcgctctcgctgagcaaggagcggcgggagcccgggccggcggcggcgggggctgcggcggccggcgcaggtgaggacgaggcggcgcccgtctgcatcggctcctgcctcgtggacatctcctacagcgagaccaagaggaggcacgtgttccggctgaccaccgctgacttctgtgaatatctctttcaggctgaggaccgggatgacatgctgggctggatcagagcgatccgggagaacagcagggccgagggcgaggaccccggctgtgccaaccaagctctgatcagcaagaagcttaatgattatcgcaaagtgagccatagctctgggcccaaagctgattcctcccccaaaggctctcgcggcctggggggcctcaagtctgagttcctcaagcagagtgcggcacgtggcctcaggactcaggacctgcccgcagggagcaaggatgacagtgctgcagcccccaaaaccccctggggcatcaacatcatcaagaaaaataagaaggccgctccgagggcgtttggggtcaggctggaggagtgccagccagccacggagaaccagcgcgtccccttaatcgtggctgcatgctgtcgcattgtggaggcacgagggctggagtccacaggcatttaccgagtgcccggcaacaatgcagtggtgtccagcctacaggagcagctcaaccgcgggcctggtgacatcaacctgcaggatgagcgctggcaagacctcaatgtgatcagcagcctgctcaagtccttcttccgaaagctgcccgagcctcttttcactgatgacaaatacaacgacttcatcgaggccaaccgcattgaggacgcgcgggagcgaatgaggacgctgcggaagctgatccgggatctcccaggacactactatgaaacgctcaaattccttgtgggccatctcaagaccatcgctgaccactctgagaaaaacaagatggaaccccggaacctggccctggtctttgggccgacactggtgaggacgtctgaggacaacatgacagacatggtgacccacatgcctgaccgctacaagatcgtggagacactgatccagcactcagactggttcttcagtgacgaagaggacaagggagagagaacccctgtgggcgacaaggagcctcaggcagtgcccaacattgagtacctcctgcccaacattggcaggacagtgccccctggcgacccggggtcagcggacctgttggagatttaaagggtacagtgcggtgtcgcggcctcggtcactaacagtggcgggtgattataagaaggctgggtgggcacagcggcaggcagaatgtcccggactgtgaggaccccacgctgacatgccagttacccctgcctgttatccacttaccccagcagtccatgcccctcccattctaaagccccttctcaggaggaaggaggcactcactagggcccagggccctccccgttgcctggacacctgggcatcgaattgctgccctcctgcagtgccacagaccctgcggcctctctttgccgagtctcaccactgctagtcatccaggctggggaccgacactctctggagaccagcgatgccacgcccagaagcttctctttatctctaactcctgcctcagtcaccccaatgggccgcctcttcctgcttaagaaaccggggccctaagtcctgtttgcagggcctgtggccctctcatggcagaggacagatgatttacatgctcagagacagatgagggccactccctttgtggctgcagccactgactcctccccccgccatggttgtccctccctttagttttagcatttctgttcgtctctgacagaggcacacaggagctccctagtcaccagaggcaggctcaggaggggccagaagacatgggggtgggacggcagagagggaccccatgtctcttctaatcacccgccgccccccgcgccctgtgtgtcgtgtgtggtcgcccatcttgcttttctcaccttgtgcagggggaggggtccggagaggggggcgtctaacttgcctgccagagagtgtggattaaccgcacctgcccactaccctgtgggaccccaggaggcccttggaccaacctgctccctctttagccttggaggggacccaccaggacgtgtttctggttccttctccaccccagtgatattaagggagtgggacccaagtcccatagaaatcatgcttttagtctccttcataactgggtgataactggggaccctgcccatgaggcagggtgaccccaggtccggaggtggaacctatcaaggctctaatcaccagcccactccacctcctgcgtcccacccacttcatttttgcccttttatccattattcatgtggtccctcttctctgttgtgtgctcgggggtggatgtagggcacccacctctctgtgcactgtgtggtctccatttctccagagcatctgtgatttgctgtgtttcactgtggtggtttccatggactgcacctgatatttggcattttctctccagtgcttcagagtaacagggacgggcggggaaggggagaggaaccaggctcaaagacaatgcccccttgcccttagccatcggtaaatgaggggccagtggctggcagcctgatgtcacttcctgcctctagaggaagtggcagttaacatcattttctcctccatccctctcccatagatggacatcagatgtccatcatactcctagggcctggggagatctcatgtttcagaattccctggtttctgaagcctttgaggagagggaattgtgtgcataagactcagctttcttttttcctgatgcaactttcatttttttttctgtctttcaccaacagattctaccacctgtagttcagccaagtccaaggtacgtatgaaggcaattctgaaggcttgatccctgtacaaggcagcccactttggtttttgttcaagggaattgagggaatggcagttggaccatggggaaagttgatggtccctgggagggaaggcaggaggtaccgagtgcccaaggtaagctgagaaattgcttaccttggcagtgtttggtgaggcatctgctgtagtagaaggacctggcctgggagttatgtggctaggaggcaatgtcactcagtagttagaagcacagactctgcagtcagacagtcctgggtttgagttctggctccaccatttagtagtttgggacattgggcaagttacttaaccactttctgatccttagcttcctcatctataaaatgggaatatcagtaaatctgtggggtgctataataaataaaacagatatcctttaaggtctttggagagcctaaagcaagcagaaggaaataaagagaggagcagaaatccatgaaatagaaaacagttgaaaaaaagcaatgaaaccaaaagctggttctttgaaaaaaaatcagtgaaattgataaacctctagc

SEQ ID NO: 212 - DNA, 1503 bp, Homo sapien
cagatgcgaccgaatgcgatatcaggagagaaggctggttgtattataagcagattctcaccaagaaggggaaggctgaggaccgggatgacatgctgggctggatcagagcgatccgggagaacagcagggccgagggcgaggaccccggctgtgccaaccaagctctgatcagcaagaagcttaatgattatcgcaaagtgagccatagctctgggcccaaagctgattcctcccccaaaggctctcgcggcctggggggcctcaagtctgagttcctcaagcagagtgcggcacgtggcctcaggactcaggacctgcccgcagggagcaaggatgacagtgctgcagcccccaaaaccccctggggcatcaacatcatcaagaaaaataagaaggccgctccgagggcgtttggggtcaggctggaggagtgccagccagccacggagaaccagcgcgtccccttaatcgtggctgcatgctgtcgcattgtggaggcacgagggctggagtccacaggcatttaccgagtgcccggcaacaatgcagtggtgtccagcctacaggagcagctcaaccgcgggcctggtgacatcaacctgcaggatgagcgctggcaagacctcaatgtgatcagcagcctgctcaagtccttcttccgaaagctgcccgagcctcttttcactgatgacaaatacaacgacttcatcgaggccaaccgcattgaggacgcgcgggagcgaatgaggacgctgcggaagctgatccgggatctcccaggacactactatgaaacgctcaaattccttgtgggccatctcaagaccatcgctgaccactctgagaaaaacaagatggaaccccggaacctggccctggtctttgggccgacactggtgaggacgtctgaggacaacatgacagacatggtgacccacatgcctgaccgctacaagatcgtggagacactgatccagcactcagactggttcttcagtgacgaagaggacaagggagagagaacccctgtgggcgacaaggagcctcaggcagtgcccaacattgagtacctcctgcccaacattggcaggacagtgccccctggcgacccggggtcagattctaccacctgtagttcagccaagtccaagggttcgtgggcccccaagaaggagccgtacgcccgggagatgctggcgatctccttcatctcggccgtcaaccgcaagcgcaagaagcggcgggaggcgcgggggctgggcagcagcaccgacgacgactcggagcaggaggcgcacaagcctggggcgggggccacagcgccggggactcaggagcggccgccggggagccgatgcccggcgccggcggccgatgccccgcgccgccgccaccgcggcccccggacccggcagtcccccggcggcgcgggaggggccgccggccgcggcgacgcgctccattgtgtcgggctaatccaacctgtcaccatggaccgga

SEQ ID NO: 213 - DNA, 1079 bp, Homo sapien
gagctgatctagaggatcccgaagcgcacgatggcgcgtccccttaatcgtggctgcatgctgtcgcattgtggaggcacgagggctggagtccacaggcatttaccgagtgcccggcaacaatgcagtggtgtccagcctacaggagcagctcaaccgcgggcctggtgacatcaacctgcaggatgagcgctggcaagacctcaatgtgatcagcagcctgctcaagtccttcttccgaaagctgcccgagcctcttttcactgatgacaaatacaacgacttcatcgaggccaaccgcattgaggacgcgcgggagcgaatgaggacgctgcggaagctgatccgggatctcccaggacactactatgaaacgctcaaattccttgtgggccatctcaagaccatcgctgaccactctgagaaaaacaagatggaaccccggaacctggccctggtctttgggccgacactggtgaggacgtctgaggacaacatgacagacatggtgacccacatgcctgaccgctacaagatcgtggagacactgatccagcactcagactggttcttcagtgacgaagaggacaagggagagagaacccctgtgggcgacaaggagcctcaggcagtgcccaacattgagtacctcctgcccaacattggcaggacagtgccccctggcgacccggggtcagattctaccacctgtagttcagccaagtccaagggttcgtgggcccccaagaaggagccgtacgcccgggagatgctggcgatctccttcatctcggccgtcaaccgcaagcgcaagaagcggcgggaggcgcgggggctgggcagcagcaccgacgacgactcggagcaggaggcgcacaagcctggggcgggggccacagcgccggggactcaggagcggccgccggggagccgatgcccggcgccggcggccgatgccccgcgccgccgccaccgcggcccccggacccggcagtcccccggcggcgcgggaggggccgccggccgcggcgacgcgctccattgtgtcgggctaatccaacctgtcaccatggaccgga

SEQ ID NO: 214 - DNA, 2403 bp, Homo sapien
cagactggagtgccagcaggccttgtcacactggctgtcaaaccaggtaccccgccgggcgggggagagacggtgcccagccatggccccccgggcccgcagcgcctcccaggaccggttggaggaggtggctgccccccgcccgtggccctgctccacctcccaggatgctttgagccagctgggccaggagggctggcaccgagctcgctcagatgactacttgagccgggccacccgttctgccgaggcactggggccaggggcactggtgtcaccccgctttgagcggtgtggctgggcttcccagcgttcgtctgcccgcacccccgcctgcccaactcgggacctgccagggccccaggccccaaccccgtctggcctgcagggcctggatgacctcgggtacatcggctaccggagctacagcccatcattccagcgaccggaccggcctcctccatgcgctctccttccgggactcaccctttggggggctgcctaccttcaacctggcccagtcccctgcgtcattcccaccagaggcctccgagccacccagggttgtacggccggaacccagcacccgggccctggagcctcctgcggaggatcgcggcgatgaggtggtcctgaggcagaagcccccgacgggccgcaaggttcagctgacccccgcaagacagatgaaccttggatttggtgacgagtccccagagccagaggccagtgggcgaggggaacgcctgggcaggaaggtggcccctttggccaccaccgaagactctctggcttccatcccctttattgatgagcccaccagccccagcattgacctccaagccaagcacgtccctgcctctgctgtggtctccagtgccatgaactcagcccctgtcctgggcaccagcccatcttccccgaccttcactttcaccctcggacgccattactcgcaggactgcagcagcatcaaggctggccgccgctcctcctacctgctggccatcaccacggagcgctccaagtcctgcgatgatggactcaacaccttccgcgacgagggccgggttctgcggcgcctgccaaaccgcatacccagcctgcggatgctccggagcttcttcaccgacgggtccttggatagctggggcacctctgaagatgctgacgctccttctaagcgacactcaacctctgacctctcagatgcgaccttcagcgatatcaggagagaaggctggttgtattataagcagattctcaccaagaaggggaagaaagcgggcagcggcctgcgccagtggaagcgggtgtacgccgcgctgcgggcgcgctcgctctcgctgagcaaggagcggcgggagcccgggccggcggcggcgggggctgcggcggccggcgcaggtgaggacgaggcggcgcccgtctgcatcggctcctgcctcgtggacatctcctacagcgagaccaagaggaggcacgtgttccggctgaccaccgctgacttctgtgaatatctctttcaggctgaggaccgggatgacatgctgggctggatcagagcgatccgggagaacagcagggccgagggcgaggaccccggctgtgccaaccaagctctgatcagcaagaagcttaatgattatcgcaaagtgagccatagctctgggcccaaagctgattcctcccccaaaggctctcgcggcctggggggcctcaagtctgagttcctcaagcagagtgcggcacgtggcctcaggactcaggacctgcccgcagggagcaaggatgacagtgctgcagcccccaaaaccccctggggcatcaacatcatcaagaaaaataagaaggccgctccgagggcgtttggggtcaggctggaggagtgccagccagccacggagaaccagcgcgtccccttaatcgtggctgcatgctgtcgcattgtggaggcacgagggctggagtccacaggcatttaccgagtgcccggcaacaatgcagtggtgtccagcctacaggagcagctcaaccgcgggcctggtgacatcaacctgcaggatgagcgctggcaagacctcaatgtgatcagcagcctgctcaagtccttcttccgaaagctgcccgagcctcttttcactgatggtgcccttctcttctgacctgctgaaccttggtgtccatgtcctggagacgggggcagggaccccttttctgggatcagcatgcagctcagatggtattgcctcccaaatgaacacagctgggctaccccaggtcaggtgcacacccgagtgtagctgtgacawatacaacgacttyatcgatggccwwyacgmacgtgaggacgtgattcctggttacaaggatactctagaataactatgagctgtacgtcgc

SEQ ID NO: 215 - DNA, 2439 bp, Homo sapien
cagactggagtgccagcaggccttgtcacactggctgtcaaaccaggtaccccgccgggcgggggagagacggtgcccagccatggccccccgggcccgcagcgcctcccaggaccggttggaggaggtggctgccccccgcccgtggccctgctccacctcccaggatgctttgagccagctgggccaggagggctggcaccgagctcgctcagatgactacttgagccgggccacccgttctgccgaggcactggggccaggggcactggtgtcaccccgctttgagcggtgtggctgggcttcccagcgttcgtctgcccgcacccccgcctgcccaactcgggacctgccagggccccaggccccaaccccgtctggcctgcagggcctggatgacctcgggtacatcggctaccggagctacagcccatcattccagcgaccggaccggcctcctccatgcgctctccttccgggactcaccctttggggggctgcctaccttcaacctggcccagtcccctgcgtcattcccaccagaggcctccgagccacccagggttgtacggccggaacccagcacccgggccctggagcctcctgcggaggatcgcggcgatgaggtggtcctgaggcagaagcccccgacgggccgcaaggttcagctgacccccgcaagacagatgaaccttggatttggtgacgagtccccagagccagaggccagtgggcgaggggaacgcctgggcaggaaggtggcccctttggccaccaccgaagactctctggcttccatcccctttattgatgagcccaccagccccagcattgacctccaagccaagcacgtccctgcctctgctgtggtctccagtgccatgaactcagcccctgtcctgggcaccagcccatcttccccgaccttcactttcaccctcggacgccattactcgcaggactgcagcagcatcaaggctggccgccgctcctcctacctgctggccatcaccacggagcgctccaagtcctgcgatgatggactcaacaccttccgcgacgagggccgggttctgcggcgcctgccaaaccgcatacccagcctgcggatgctccggagcttcttcaccgacgggtccttggatagctggggcacctctgaagatgctgacgctccttctaagcgacactcaacctctgacctctcagatgcgaccttcagcgatatcaggagagaaggctggttgtattataagcagattctcaccaagaaggggaagaaagcgggcagcggcctgcgccagtggaagcgggtgtacgccgcgctgcgggcgcgctcgctctcgctgagcaaggagcggcgggagcccgggccggcggcggcgggggctgcggcggccggcgcaggtgaggacgaggcggcgcccgtctgcatcggctcctgcctcgtggacatctcctacagcgagaccaagaggaggcacgtgttccggctgaccaccgctgacttctgtgaatatctctttcaggctgaggaccgggatgacatgctgggctggatcagagcgatccgggagaacagcagggccgagggcgaggaccccggctgtgccaaccaagctctgatcagcaagaagcttaatgattatcgcaaagtgagccatagctctgggcccaaagctgattcctcccccaaaggctctcgcggcctggggggcctcaagtctgagttcctcaagcagagtgcggcacgtggcctcaggactcaggacctgcccgcagggagcaaggatgacagtgctgcagcccccaaaaccccctggggcatcaacatcatcaagaaaaataagaaggccgctccgagggcgtttggggtcaggctggaggagtgccagccagccacggagaaccagcgcgtccccttaatcgtggctgcatgctgtcgcattgtggaggcacgagggctggagtccacaggcatttaccgagtgcccggcaacaatgcagtggtgtccagcctacaggagcagctcaaccgcgggcctggtgacatcaacctgcaggatgaggtgggtgaagctggggggtctgtggaaggggggctgagatggtgtgtgggtggtgctccgcttggagagttctgtggtctattgtgttgcatgcattgtgccctatgacatgcccggcattggtccagaacaccaagatgggcaagatgggacctgcccccgctggccagcccggggatgggcatcaccccaggctgaagctgaccaagtaaatgcagtcatggcctggggagctctgaggcagaggctcacagatggcagttttgtccgagtgtttaggatgagtagagttcaccaaaggccggtgaaagccaggtgagggcattccaggcagcagaatggcctgctcaatggtgtagacgcggaaagt

SEQ ID NO: 216 - DNA, 889 bp, Homo sapien
ctcccagcagggcccttggccgggagagcaggggaaggcgctgcccccacctctctaaagagtctccgctgtgttctagacaaatacaacgacttcatcgaggccaaccgcattgaggacgcgcgggagcgaatgaggacgctgcggaagctgatccgggatctcccaggacactactatgaaacgctcaaattccttgtgggccatctcaagaccatcgctgaccactctgagaaaaacaagatggaaccccggaacctggccctggtctttgggccgacactggtgaggacgtctgaggacaacatgacagacatggtgacccacatgcctgaccgctacaagatcgtggagacactgatccagcactcagactggttcttcagtgacgaagaggacaagggagagagaacccctgtgggcgacaaggagcctcaggcagtgcccaacattgagtacctcctgcccaacattggcaggacagtgccccctggcgacccggggtcagattctaccacctgtagttcagccaagtccaagggttcgtgggcccccaagaaggagccgtacgcccgggagatgctggcgatctccttcatctcggccgtcaaccgcaagcgcaagaagcggcgggaggcgcgggggctgggcagcagcaccgacgacgactcggagcaggaggcgcacaagcctggggcgggggccacagcgccggggactcaggagcggccgccggggagccgatgcccggcgccggcggccgatgccccgcgccgccgccaccgcggcccccggacccggcagtcccccggcggcgcgggaggggccgccggccgcggcgacgcgctccattgtgtcgggctaatccaacctgtcaccatggaccgga

SEQ ID NO: 217 - DNA, 2106 bp, Homo sapien
cagactggagtgccagcaggccttgtcacactggctgtcaaaccaggtaccccgccgggcgggggagagacggtgcccagccatggccccccgggcccgcagcgcctcccaggaccggttggaggaggtggctgccccccgcccgtggccctgctccacctcccaggatgctttgagccagctgggccaggagggctggcaccgagctcgctcagatgactacttgagccgggccacccgttctgccgaggcactggggccaggggcactggtgtcaccccgctttgagcggtgtggctgggcttcccagcgttcgtctgcccgcacccccgcctgcccaactcgggacctgccagggccccaggccccaaccccgtctggcctgcagggcctggatgacctcgggtacatcggctaccggagctacagcccatcattccagcgaccggaccggcctcctccatgcgctctccttccgggactcaccctttggggggctgcctaccttcaacctggcccagtcccctgcgtcattcccaccagaggcctccgagccacccagggttgtacggccggaacccagcacccgggccctggagcctcctgcggaggatcgcggcgatgaggtggtcctgaggcagaagcccccgacgggccgcaaggttcagctgacccccgcaagacagatgaaccttggatttggtgacgagtccccagagccagaggccagtgggcgaggggaacgcctgggcaggaaggtggcccctttggccaccaccgaagactctctggcttccatcccctttattgatgagcccaccagccccagcattgacctccaagccaagcacgtccctgcctctgctgtggtctccagtgccatgaactcagcccctgtcctgggcaccagcccatcttccccgaccttcactttcaccctcggacgccattactcgcaggactgcagcagcatcaaggctggccgccgctcctcctacctgctggccatcaccacggagcgctccaagtcctgcgatgatggactcaacaccttccgcgacgagggccgggttctgcggcgcctgccaaaccgcatacccagcctgcggatgctccggagcttcttcaccgacgggtccttggatagctggggcacctctgaagatgctgacgctccttctaagcgacactcaacctctgacctctcagatgcgaccttcagcgatatcaggagagaaggctggttgtattataagcagattctcaccaagaaggggaagaaagcgggcagcggcctgcgccagtggaagcgggtgtacgccgcgctgcgggcgcgctcgctctcgctgagcaaggagcggcgggagcccgggccggcggcggcgggggctgcggcggccggcgcaggtgaggacgaggcggcgcccgtctgcatcggctcctgcctcgtggacatctcctacagcgagaccaagaggaggcacgtgttccggctgaccaccgctgacttctgtgaatatctctttcaggctgaggaccgggatgacatgctgggctggatcagagcgatccgggagaacagcagggccgagggcgaggtgagggcccggccagcccggcagccacagagggcgggcggggtggcctctcaccggctgtggacctgggatgcccgctctgagcctcacttccctctgctagaaaggggggctgacaggagtgcacctcgtgattgtgtcccccaaggtttcggggtgaggagggtgcacaggcagggctcacgggggtaagagtgaaggaagtactgggggttccggagaactaaggggctggtgtccttgggcatgaagtaggggtctgtgccccctccacactccatcagcccccacttatgttcttcagcacagctgtagccaatgagaacagttatgcaggagccccagagcttccggcatgcatgtgagagctgcacagttacatgtacacatgacatgtatttgcagacactatatgcacacagagagatacacacatgcatgtccatggccagcacgcgatgcacacagagagacatgtgagcacacgaacacagacagtgaagtcccc

SEQ ID NO: 218 - DNA, 912 bp, Homo sapien
ctcccagcagggcccttggccgggagagcaggggaaggcgctgcccccacctctctaaagagtctccgctgtgttctagacaaatacaacgacttcatcgaggccaaccgcattgaggacgcgcgggagcgaatgaggacgctgcggaagctgatccgggatctcccaggacactactatgaaacgctcaaattccttgtgggccatctcaagaccatcgctgaccactctgagaaaaacaagatggaaccccggaacctggccctggtctttgggccgacactggtgaggacgtctgaggacaacatgacagacatggtgacccacatgcctgaccgctacaagatcgtggagacactgatccagcactcagactggttcttcagtgacgaagaggacaagggagagagaacccctgtgggcgacaaggagcctcaggcagtgcccaacattgagtacctcctgcccaacattggcaggacagtgccccctggcgacccggggtcagcggacctgttggagatttaaaggattctaccacctgtagttcagccaagtccaagggttcgtgggcccccaagaaggagccgtacgcccgggagatgctggcgatctccttcatctcggccgtcaaccgcaagcgcaagaagcggcgggaggcgcgggggctgggcagcagcaccgacgacgactcggagcaggaggcgcacaagcctggggcgggggccacagcgccggggactcaggagcggccgccggggagccgatgcccggcgccggcggccgatgccccgcgccgccgccaccgcggcccccggacccggcagtcccccggcggcgcgggaggggccgccggccgcggcgacgcgctccattgtgtcgggctaatccaacctgtcaccatggaccgga

SEQ ID NO: 219 - DNA, 515 bp, Homo sapien
cagatgcgaccgaatgcgatatcaggagagaaggctggttgtattataagcagattctcaccaagaaggggaaggctgaggaccgggatgacatgctgggctggatcagagcgatccgggagaacagcagggccgagggcgaggaccccggctgtgccaaccaagctctgatcagcaagaagcttaatgattatcgcaaagtgagccatagctctgggcccaaagctgattcctcccccaaaggctctcgcggcctggggggcctcaagtctgagttcctcaagcagagtgcggcacgtggcctcaggactcaggacctgcccgcagggagcaaggatgacagtgctgcagcccccaaaaccccctggggcatcaacatcatcaagaaaaataagaaggccgctccgagggcgtttggggtcaggctggaggagtgccagccagccacggagaaccagcgcgtcccctaatcryggctgcatgctatcgcattcggtctgtaacctctaggtcag

SEQ ID NO: 220 - DNA, 680 bp, Homo sapien
  misc_feature (398)..(398): n=a,c,g or t
  misc_feature (419)..(419): n=a,c,g or t
  misc_feature (421)..(421): n=a,c,g or t
  misc_feature (459)..(459): n=a,c,g or t
  misc_feature (510)..(510): n=a,c,g or t
ggatctcccmggcmctwctatgaacgctccaattccctgtgggaccctttctcmgaccwacgtcttccctttataagtagctgtggggctgctgctactctgtctcygtagtttttcctctccaaaaaataagaaggccgctccgagggcgtttggggtcaggctggaggagtgccagccagccacggagaaccagcgcgtccccttaatcgtggctgcatgctgtcgcattgtggaggcacgagggctggagtccacaggcatttaccgagtgcccggcaacaatgcagtggtgtccagcctacaggagcagctcaaccgcgggcctggtgacatcaacctgcaggatgagcggcatagcgcaacagagcgcgtcatactcgctagagtcacgcgangccttgctatacaacggtgcncngtctctacgctgcaaatgtcgtagcactcacgagagcncttcactttatcaagccgtcgatgatctgagactcactcactgagcattcnatcgacggcccaagcccgcactctgacggactgcgcgtggagcagaatgaggacgctgcggaagctgatccgggatctcccaggacactactatgaaacgctcaaattccttgtgggaccttttctcagacaacgtcttccttttataagtagctgtgggmtgctgctac

SEQ ID NO: 221 - DNA, 2836 bp, Homo sapien
cagactggagtgccagcaggccttgtcacactggctgtcaaaccaggtaccccgccgggcgggggagagacggtgcccagccatggccccccgggcccgcagcgcctcccaggaccggttggaggaggtggctgccccccgcccgtggccctgctccacctcccaggatgctttgagccagctgggccaggagggctggcaccgagctcgctcagatgactacttgagccgggccacccgttctgccgaggcactggggccaggggcactggtgtcaccccgctttgagcggtgtggctgggcttcccagcgttcgtctgcccgcacccccgcctgcccaactcgggacctgccagggccccaggccccaaccccgtctggcctgcagggcctggatgacctcgggtacatcggctaccggagctacagcccatcattccagcgaccggaccggcctcctccatgcgctctccttccgggactcaccctttggggggctgcctaccttcaacctggcccagtcccctgcgtcattcccaccagaggcctccgagccacccagggttgtacggccggaacccagcacccgggccctggagcctcctgcggaggatcgcggcgatgaggtggtcctgaggcagaagcccccgacgggccgcaaggttcagctgacccccgcaagacagatgaaccttggatttggtgacgagtccccagagccagaggccagtgggcgaggggaacgcctgggcaggaaggtggcccctttggccaccaccgaagactctctggcttccatcccctttattgatgagcccaccagccccagcattgacctccaagccaagcacgtccctgcctctgctgtggtctccagtgccatgaactcagcccctgtcctgggcaccagcccatcttccccgaccttcactttcaccctcggacgccattactcgcaggactgcagcagcatcaaggctggccgccgctcctcctacctgctggccatcaccacggagcgctccaagtcctgcgatgatggactcaacaccttccgcgacgagggccgggttctgcggcgcctgccaaaccgcatacccagcctgcggatgctccggagcttcttcaccgacgggtccttggatagctggggcacctctgaagatgctgacgctccttctaagcgacactcaacctctgacctctcagatgcgaccttcagcgatatcaggagagaaggctggttgtattataagcagattctcaccaagaaggggaagaaagcgggcagcggcctgcgccagtggaagcgggtgtacgccgcgctgcgggcgcgctcgctctcgctgagcaaggagcggcgggagcccgggccggcggcggcgggggctgcggcggccggcgcaggctgaggaccgggatgacatgctgggctggatcagagcgatccgggagaacagcagggccgagggcgaggaccccggctgtgccaaccaagctctgatcagcaagaagcttaatgattatcgcaaagtgagccatagctctgggcccaaagctgattcctcccccaaaggctctcgcggcctggggggcctcaagtctgagttcctcaagcagagtgcggcacgtggcctcaggactcaggacctgcccgcagggagcaaggatgacagtgctgcagcccccaaaaccccctggggcatcaacatcatcaagaaaaataagaaggccgctccgagggcgtttggggtcaggctggaggagtgccagccagccacggagaaccagcgcgtccccttaatcgtggctgcatgctgtcgcattgtggaggcacgagggctggagtccacaggcatttaccgagtgcccggcaacaatgcagtggtgtccagcctacaggagcagctcaaccgcgggcctggtgacatcaacctgcaggatgagcgctggcaagacctcaatgtgatcagcagcctgctcaagtccttcttccgaaagctgcccgagcctcttttcactgatgacaaatacaacgacttcatcgaggccaaccgcattgaggacgcgcgggagcgaatgaggacgctgcggaagctgatccgggatctcccaggacactactatgaaacgctcaaattccttgtgggccatctcaagaccatcgctgaccactctgagaaaaacaagatggaaccccggaacctggccctggtctttgggccgacactggtgaggacgtctgaggacaacatgacagacatggtgacccacatgcctgaccgctacaagatcgtggagacactgatccagcactcagactggttcttcagtgacgaagaggacaagggagagagaacccctgtgggcgacaaggagcctcaggcagtgcccaacattgagtacctcctgcccaacattggcaggacagtgccccctggcgacccggggtcagattctaccacctgtagttcagccaagtccaagggttcgtgggcccccaagaaggagccgtacgcccgggagatgctggcgatctccttcatctcggccgtcaaccgcaagcgcaagaagcggcgggaggcgcgggggctgggcagcagcaccgacgacgactcggagcaggaggcgcacaagcctggggcgggggccacagcgccggggactcaggagcggccgccggggagccgatgcccggcgccggcggccgatgccccgcgccgccgccaccgcggcccccggacccggcagtcccccggcggcgcgggaggggccgccggccgcggcgacgcgctccattgtgtcgggctaatccaacctgtcaccatggaccgga

SEQ ID NO: 222 - DNA, 3186 bp, Homo sapien
cagactggagtgccagcaggccttgtcacactggctgtcaaaccaggtaccccgccgggcgggggagagacggtgcccagccatggccccccgggcccgcagcgcctcccaggaccggttggaggaggtggctgccccccgcccgtggccctgctccacctcccaggatgctttgagccagctgggccaggagggctggcaccgagctcgctcagatgactacttgagccgggccacccgttctgccgaggcactggggccaggggcactggtgtcaccccgctttgagcggtgtggctgggcttcccagcgttcgtctgcccgcacccccgcctgcccaactcgggacctgccagggccccaggccccaaccccgtctggcctgcagggcctggatgacctcgggtacatcggctaccggagctacagcccatcattccagcgaccggaccggcctcctccatgcgctctccttccgggactcaccctttggggggctgcctaccttcaacctggcccagtcccctgcgtcattcccaccagaggcctccgagccacccagggttgtacggccggaacccagcacccgggccctggagcctcctgcggaggatcgcggcgatgaggtggtcctgaggcagaagcccccgacgggccgcaaggttcagctgacccccgcaagacagatgaaccttggatttggtgacgagtccccagagccagaggccagtgggcgaggggaacgcctgggcaggaaggtggcccctttggccaccaccgaagactctctggcttccatcccctttattgatgagcccaccagccccagcattgacctccaagccaagcacgtccctgcctctgctgtggtctccagtgccatgaactcagcccctgtcctgggcaccagcccatcttccccgaccttcactttcaccctcggacgccattactcgcaggactgcagcagcatcaaggctggccgccgctcctcctacctgctggccatcaccacggagcgctccaagtcctgcgatgatggactcaacaccttccgcgacgagggccgggttctgcggcgcctgccaaaccgcatacccagcctgcggatgctccggagcttcttcaccgacgggtccttggatagctggggcacctctgaagatgctgacgctccttctaagcgacactcaacctctgacctctcagatgcgaccttcagcgatatcaggagagaaggctggttgtattataagcagattctcaccaagaaggggaagaaagcgggcagcggcctgcgccagtggaagcgggtgtacgccgcgctgcgggcgcgctcgctctcgctgagcaaggagcggcgggagcccgggccggcggcggcgggggctgcggcggccggcgcaggtgaggacgaggcggcgcccgtctgcatcggctcctgcctcgtggacatctcctacagcgagaccaagaggaggcacgtgttccggctgaccaccgctgacttctgtgaatatctctttcaggctgaggaccgggatgacatgctgggctggatcagagcgatccgggagaacagcagggccgagggcgaggaccccggctgtgccaaccaagctctgatcagcaagaagcttaatgattatcgcaaagtgagccatagctctgggcccaaagctgattcctcccccaaaggctctcgcggcctggggggcctcaagtctgagttcctcaagcagagtgcggcacgtggcctcaggactcaggacctgcccgcagggagcaaggatgacagtgctgcagcccccaaaaccccctggggcatcaacatcatcaagaaaaataagaaggccgctccgagggcgtttggggtcaggctggaggagtgccagccagccacggagaaccagcgcgtccccttaatcgtggctgcatgctgtcgcattgtggaggcacgagggctggagtccacaggcatttaccgagtgcccggcaacaatgcagtggtgtccagcctacaggagcagctcaaccgcgggcctggtgacatcaacctgcaggatgagcgctggcaagacctcaatgtgatcagcagcctgctcaagtccttcttccgaaagctgcccgagcctcttttcactgatgacaaatacaacgacttcatcgaggccaaccgcattgaggacgcgcgggagcgaatgaggacgctgcggaagctgatccgggatctcccaggacactactatgaaacgctcaaattccttgtgggccatctcaagaccatcgctgaccactctgagaaaaacaagatggaaccccggaacctggccctggtctttgggccgacactggtgaggacgtctgaggacaacatgacagacatggtgacccacatgcctgaccgctacaagatcgtggagacactgatccagcactcagactggttcttcagtgacgaagaggacaagggagagagaacccctgtgggcgacaaggagcctcaggcagtgcccaacattgagtacctcctgcccaacattggcaggacagtgccccctggcgacccggggtcagattctaccacctgtagttcagccaagtccaaggtacgtatgaaggcaattctgaaggcttgatccctgtacaaggcagcccactttggtttttgttcaagggaattgagggaatggcagttggaccatggggaaagttgatggtccctgggagggaaggcaggaggtaccgagtgcccaaggtaagctgagaaattgcttaccttggcagtgtttggtgaggcatctgctgtagtagaaggacctggcctgggagttatgtggctaggaggcaatgtcactcagtagttagaagcacagactctgcagtcagacagtcctgggtttgagttctggctccaccatttagtagtttgggacattgggcaagttacttaaccactttctgatccttagcttcctcatctataaaatgggaatatcagtaaatctgtggggtgctataataaataaaacagatatcctttaaggtctttggagagcctaaagcaagcagaaggaaataaagagaggagcagaaatccatgaaatagaaaacagttgaaaaaaagcaatgaaaccaaaagctggttctttgaaaaaaaatcagtgaaattgataaacctctagc

SEQ ID NO: 223 - DNA, 2861 bp, Homo sapien
cagactggagtgccagcaggccttgtcacactggctgtcaaaccaggtaccccgccgggcgggggagagacggtgcccagccatggccccccgggcccgcagcgcctcccaggaccggttggaggaggtggctgccccccgcccgtggccctgctccacctcccaggatgctttgagccagctgggccaggagggctggcaccgagctcgctcagatgactacttgagccgggccacccgttctgccgaggcactggggccaggggcactggtgtcaccccgctttgagcggtgtggctgggcttcccagcgttcgtctgcccgcacccccgcctgcccaactcgggacctgccagggccccaggccccaaccccgtctggcctgcagggcctggatgacctcgggtacatcggctaccggagctacagcccatcattccagcgaccggaccggcctcctccatgcgctctccttccgggactcaccctttggggggctgcctaccttcaacctggcccagtcccctgcgtcattcccaccagaggcctccgagccacccagggttgtacggccggaacccagcacccgggccctggagcctcctgcggaggatcgcggcgatgaggtggtcctgaggcagaagcccccgacgggccgcaaggttcagctgacccccgcaagacagatgaaccttggatttggtgacgagtccccagagccagaggccagtgggcgaggggaacgcctgggcaggaaggtggcccctttggccaccaccgaagactctctggcttccatcccctttattgatgagcccaccagccccagcattgacctccaagccaagcacgtccctgcctctgctgtggtctccagtgccatgaactcagcccctgtcctgggcaccagcccatcttccccgaccttcactttcaccctcggacgccattactcgcaggactgcagcagcatcaaggctggccgccgctcctcctacctgctggccatcaccacggagcgctccaagtcctgcgatgatggactcaacaccttccgcgacgagggccgggttctgcggcgcctgccaaaccgcatacccagcctgcggatgctccggagcttcttcaccgacgggtccttggatagctggggcacctctgaagatgctgacgctccttctaagcgacactcaacctctgacctctcagatgcgaccttcagcgatatcaggagagaaggctggttgtattataagcagattctcaccaagaaggggaagaaagcgggcagcggcctgcgccagtggaagcgggtgtacgccgcgctgcgggcgcgctcgctctcgctgagcaaggagcggcgggagcccgggccggcggcggcgggggctgcggcggccggcgcaggtgaggacgaggcggcgcccgtctgcatcggctcctgcctcgtggacatctcctacagcgagaccaagaggaggcacgtgttccggctgaccaccgctgacttctgtgaatatctctttcaggctgaggaccgggatgacatgctgggctggatcagagcgatccgggagaacagcagggccgagggcgaggaccccggctgtgccaaccaagctctgatcagcaagaagcttaatgattatcgcaaagtgagccatagctctgggcccaaagctgattcctcccccaaaggctctcgcggcctggggggcctcaagtctgagttcctcaagcagagtgcggcacgtggcctcaggactcaggacctgcccgcagggagcaaggatgacagtgctgcagcccccaaaaccccctggggcatcaacatcatcaagaaaaataagaaggccgctccgagggcgtttggggtcaggctggaggagtgccagccagccacggagaaccagcgcgtccccttaatcgtggctgcatgctgtcgcattgtggaggcacgagggctggagtccacaggcatttaccgagtgcccggcaacaatgcagtggtgtccagcctacaggagcagctcaaccgcgggcctggtgacatcaacctgcaggatgagcgctggcaagacctcaatgtgatcagcagcctgctcaagtccttcttccgaaagctgcccgagcctcttttcactgatgacaaatacaacgacttcatcgaggccaaccgcattgaggacgcgcgggagcgaatgaggacgctgcggaagctgatccgggatctcccaggacactactatgaaacgctcaaattccttgtgggccatctcaagaccatcgctgaccactctgagaaaaacaagatggaaccccggaacctggccctggtctttgggccgacactggtgaggacgtctgaggacaacatgacagacatggtgacccacatgcctgaccgctacaagatcgtggagacactgatccagcactcagactggttcttcagtgacgaagaggacaagggagagagaattctaccacctgtagttcagccaagtccaagggttcgtgggcccccaagaaggagccgtacgcccgggagatgctggcgatctccttcatctcggccgtcaaccgcaagcgcaagaagcggcgggaggcgcgggggctgggcagcagcaccgacgacgactcggagcaggaggcgcacaagcctggggcgggggccacagcgccggggactcaggagcggccgccggggagccgatgcccggcgccggcggccgatgccccgcgccgccgccaccgcggcccccggacccggcagtcccccggcggcgcgggaggggccgccggccgcggcgacgcgctccattgtgtcgggctaatccaacctgtcaccatggaccgga

SEQ ID NO: 224 - DNA, 3118 bp, Homo sapien
cagactggagtgccagcaggccttgtcacactggctgtcaaaccaggtaccccgccgggcgggggagagacggtgcccagccatggccccccgggcccgcagcgcctcccaggaccggttggaggaggtggctgccccccgcccgtggccctgctccacctcccaggatgctttgagccagctgggccaggagggctggcaccgagctcgctcagatgactacttgagccgggccacccgttctgccgaggcactggggccaggggcactggtgtcaccccgctttgagcggtgtggctgggcttcccagcgttcgtctgcccgcacccccgcctgcccaactcgggacctgccagggccccaggccccaaccccgtctggcctgcagggcctggatgacctcgggtacatcggctaccggagctacagcccatcattccagcgaccggaccggcctcctccatgcgctctccttccgggactcaccctttggggggctgcctaccttcaacctggcccagtcccctgcgtcattcccaccagaggcctccgagccacccagggttgtacggccggaacccagcacccgggccctggagcctcctgcggaggatcgcggcgatgaggtggtcctgaggcagaagcccccgacgggccgcaaggttcagctgacccccgcaagacagatgaaccttggatttggtgacgagtccccagagccagaggccagtgggcgaggggaacgcctgggcaggaaggtggcccctttggccaccaccgaagactctctggcttccatcccctttattgatgagcccaccagccccagcattgacctccaagccaagcacgtccctgcctctgctgtggtctccagtgccatgaactcagcccctgtcctgggcaccagcccatcttccccgaccttcactttcaccctcggacgccattactcgcaggactgcagcagcatcaaggctggccgccgctcctcctacctgctggccatcaccacggagcgctccaagtcctgcgatgatggactcaacaccttccgcgacgagggccgggttctgcggcgcctgccaaaccgcatacccagcctgcggatgctccggagcttcttcaccgacgggtccttggatagctggggcacctctgaagatgctgacgctccttctaagcgacactcaacctctgacctctcagatgcgaccttcagcgatatcaggagagaaggctggttgtattataagcagattctcaccaagaaggggaagaaagcgggcagcggcctgcgccagtggaagcgggtgtacgccgcgctgcgggcgcgctcgctctcgctgagcaaggagcggcgggagcccgggccggcggcggcgggggctgcggcggccggcgcaggtgaggacgaggcggcgcccgtctgcatcggctcctgcctcgtggacatctcctacagcgagaccaagaggaggcacgtgttccggctgaccaccgctgacttctgtgaatatctctttcaggctgaggaccgggatgacatgctgggctggatcagagcgatccgggagaacagcagggccgagggcgaggaccccggctgtgccaaccaagctctgatcagcaagaagcttaatgattatcgcaaagtgagccatagctctgggcccaaagctgattcctcccccaaaggctctcgcggcctggggggcctcaagtctgagttcctcaagcagagtgcggcacgtggcctcaggactcaggacctgcccgcagggagcaaggatgacagtgctgcagcccccaaaaccccctggggcatcaacatcatcaagaaaaataagaaggccgctccgagggcgtttggggtcaggctggaggagtgccagccagccacggagaaccagcgcgtccccttaatcgtggctgcatgctgtcgcattgtggaggcacgagggctggagtccacaggcatttaccgagtgcccggcaacaatgcagtggtgtccagcctacaggagcagctcaaccgcgggcctggtgacatcaacctgcaggatgagcgctggcaagacctcaatgtgatcagcagcctgctcaagtccttcttccgaaagctgcccgagcctcttttcactgatggtgcccttctcttctgacctgctgaaccttggtgtccatgtcctggagacgggggcagggaccccttttctgggatcagcatgcagctcagatggtattgcctcccaaatgaacacagctgggctaccccaggtcaggtgcacacccgagtgtagctgtgacaaatacaacgacttcatcgaggccaaccgcattgaggacgcgcgggagcgaatgaggacgctgcggaagctgatccgggatctcccaggacactactatgaaacgctcaaattccttgtgggccatctcaagaccatcgctgaccactctgagaaaaacaagatggaaccccggaacctggccctggtctttgggccgacactggtgaggacgtctgaggacaacatgacagacatggtgacccacatgcctgaccgctacaagatcgtggagacactgatccagcactcagactggttcttcagtgacgaagaggacaagggagagagaacccctgtgggcgacaaggagcctcaggcagtgcccaacattgagtacctcctgcccaacattggcaggacagtgccccctggcgacccggggtcagattctaccacctgtagttcagccaagtccaagggttcgtgggcccccaagaaggagccgtacgcccgggagatgctggcgatctccttcatctcggccgtcaaccgcaagcgcaagaagcggcgggaggcgcgggggctgggcagcagcaccgacgacgactcggagcaggaggcgcacaagcctggggcgggggccacagcgccggggactcaggagcggccgccggggagccgatgcccggcgccggcggccgatgccccgcgccgccgccaccgcggcccccggacccggcagtcccccggcggcgcgggaggggccgccggccgcggcgacgcgctccattgtgtcgggctaatccaacctgtcaccatggaccgga

SEQ ID NO: 225 - DNA, 1018 bp, Homo sapien
gaagcgcacgatggcgcgctcaatgcggttggcctcttttcactgatggtgcccttctcttctgacctgctgaaccttggtgtccatgtcctggagacgggggcagggaccccttttctgggatcagcatgcagctcagatggtattgcctcccaaatgaacacagctgggctaccccaggtcaggtgcacacccgagtgtagctgtgacaaatacaacgacttcatcgaggccaaccgcattgaggacgcgcgggagcgaatgaggacgctgcggaagctgatccgggatctcccaggacactactatgaaacgctcaaattccttgtgggccatctcaagaccatcgctgaccactctgagaaaaacaagatggaaccccggaacctggccctggtctttgggccgacactggtgaggacgtctgaggacaacatgacagacatggtgacccacatgcctgaccgctacaagatcgtggagacactgatccagcactcagactggttcttcagtgacgaagaggacaagggagagagaacccctgtgggcgacaaggagcctcaggcagtgcccaacattgagtacctcctgcccaacattggcaggacagtgccccctggcgacccggggtcagattctaccacctgtagttcagccaagtccaagggttcgtgggcccccaagaaggagccgtacgcccgggagatgctggcgatctccttcatctcggccgtcaaccgcaagcgcaagaagcggcgggaggcgcgggggctgggcagcagcaccgacgacgactcggagcaggaggcgcacaagcctggggcgggggccacagcgccggggactcaggagcggccgccggggagccgatgcccggcgccggcggccgatgccccgcgccgccgccaccgcggcccccggacccggcagtcccccggcggcgcgggaggggccgccggccgcggcgacgcgctccattgtgtcgggctaatccaacctgtcaccatggaccgga

SEQ ID NO: 226 - DNA, 1844 bp, Homo sapien
aacattttcggggtatgggcccgatagggcccagggccctccccgttgcctggacacctgggcatcgaattgctgccctcctgcagtgccacagaccctgcggcctctctttgccgagtctcaccactgctagtcatccaggctggggaccgacactctctggagaccagcgatgccacgcccagaagcttctctttatctctaactcctgcctcagtcaccccaatgggccgcctcttcctgcttaagaaaccggggccctaagtcctgtttgcagggcctgtggccctctcatggcagaggacagatgatttacatgctcagagacagatgagggccactccctttgtggctgcagccactgactcctccccccgccatggttgtccctccctttagttttagcatttctgttcgtctctgacagaggcacacaggagctccctagtcaccagaggcaggctcaggaggggccagaagacatgggggtgggacggcagagagggaccccatgtctcttctaatcacccgccgccccccgcgccctgtgtgtcgtgtgtggtcgcccatcttgcttttctcaccttgtgcagggggaggggtccggagaggggggcgtctaacttgcctgccagagagtgtggattaaccgcacctgcccactaccctgtgggaccccaggaggcccttggaccaacctgctccctctttagccttggaggggacccaccaggacgtgtttctggttccttctccaccccagtgatattaagggagtgggacccaagtcccatagaaatcatgcttttagtctccttcataactgggtgataactggggaccctgcccatgaggcagggtgaccccaggtccggaggtggaacctatcaaggctctaatcaccagcccactccacctcctgcgtcccacccacttcatttttgcccttttatccattattcatgtggtccctcttctctgttgtgtgctcgggggtggatgtagggcacccacctctctgtgcactgtgtggtctccatttctccagagcatctgtgatttgctgtgtttcactgtggtggtttccatggactgcacctgatatttggcattttctctccagtgcttcagagtaacagggacgggcggggaaggggagaggaaccaggctcaaagacaatgcccccttgcccttagccatcggtaaatgaggggccagtggctggcagcctgatgtcacttcctgcctctagaggaagtggcagttaacatcattttctcctccatccctctcccatagatggacatcagatgtccatcatactcctagggcctggggagatctcatgtttcagaattccctggtttctgaagcctttgaggagagggaattgtgtgcataagactcagctttcttttttcctgatgcaactttcatttttttttctgtctttcaccaacagattctaccacctgtagttcagccaagtccaagggttcgtgggcccccaagaaggagccgtacgcccgggagatgctggcgatctccttcatctcggccgtcaaccgcaagcgcaagaagcggcgggaggcgcgggggctgggcagcagcaccgacgacgactcggagcaggaggcgcacaagcctggggcgggggccacagcgccggggactcaggagcggccgccggggagccgatgcccggcgccggcggccgatgccccgcgccgccgccaccgcggcccccggacccggcagtcccccggcggcgcgggaggggccgccggccgcggcgacgcgctccattgtgtcgggctaatccaacctgtcaccatggaccgga

SEQ ID NO: 227 - DNA, 1003 bp, Homo sapien
ctgtggagagattgtcatcaccagagccgtgtctaaaggatttagccagggctggatacggaaaacagaatggaagggggctttgggagaccagcccacctcacaagaaagagctgagagcctagatttgggccagcgggggtagtctactgagacgagagggcggacacggggactggaagagaggagcgtttatatgatgcggccgtgggtgactggacttggactggggcttgatgagcgactgggtgccgtgacgtggagaggtaggaccggagatagaagacggggtcggcagaggggccgagtccgggacgccccccgcatcctgacctgtctcccacacagggttcgtgggcccccaagaaggagccgtacgcccgggagatgctggcgatctccttcatctcggccgtcaaccgcaagcgcaagaagcggcgggaggcgcgggggctgggcagcagcaccgacgacgactcggagcaggaggcgcacaagcctggggcgggggccacagcgccggggactcaggagcggccgcwggggccgctgcctggcgccgtcgcccccgaggcccccggacgcctcagtcccccggcggcgccggaggagcggccggccgcggacacgcgctccattgtgtcgggctactccaccctgtccaccatggaccgcagcgtgtgctcgggcgctagcggtcggcgggcaggggcgggggacgaggcggacgacgagcgtagcgagctgakccacgtggagacggacactgagggcgcggcgggcgcggggcctggggggcgcctgacacgccggccgtccttcagctcgcaccacctcatgccctgcgacactctggcgcgccgccgcctggcccggggccgcccagacggcgagggcgcgggccggggcggtccccgcgccccggagccgcccggctcggcgtcgtccagcagccaggagtcgctgcggcccccggcggcggcgctggcctcccggccctcgc

SEQ ID NO: 228 - DNA, 989 bp, Homo sapien
  misc_feature (141)..(141): n=a,c,g or t
  misc_feature (147)..(147): n=a,c,g or t
  misc_feature (206)..(206): n=a,c,g or t
tctgagaaaaataagatggaatcttggaattgggttttggtttttgggtgcatactggtgaggatgtctgaggataatatgatagatatggtgacttatatgcttgattgctataagattgtggagacactgatctagcanttagantggttctttagtgatgaagaggataagggagagagaacccttgtgggtgacaaggagcntcaggcagtgcccaacattgagtacctcttgcccaacattggcaggacagtgccccctggygaccggggtcagyggacctgttggagatttaaaggattctaccacctgtagttcagccaagtccaagggttcgtgggcccccaagaaggagccgtacgcccgggagatgctggcgatctccttcatctcggccgtcaaccgcaagcgcaagaagcggcgggaggcgcgggggctgggcagcagcaccgacgacgactcggagcaggaggcgcacaagcctggggcgggggccacagcgccggggactcaggagcggccgcwggggccgctgcctggcgccgtcgcccccgaggcccccggacgcctcagtcccccggcggcgccggaggagcggccggccgcggacacgcgctccattgtgtcgggctactccaccctgtccaccatggaccgcagcgtgtgctcgggcgctagcggtcggcgggcaggggcgggggacgaggcggacgacgagcgtagcgagctgakccacgtggagacggacactgagggcgcggcgggcgcggggcctggggggcgcctgacacgccggccgtccttcagctcgcaccacctcatgccctgcgacactctggcgcgccgccgcctggcccggggccgcccagacggcgagggcgcgggccggggcggtccccgcgccccggagccgcccggctcggcgtcgtccagcagccaggagtcgctgcggcccccggcggcggcgctggcctcccggccctcgc

SEQ ID NO: 229 - DNA, 776 bp, Homo sapien
cttccaaccagtatccagctcaagaaaccctggactcccatggaacaagcagtagagaaatggtgtcctctttaccacctatcaacactgtgttcatgggaacagcagctggaggcacttaaaccaccaatgtgggagggggtgctaaaactttaaaaaaaatctctactgtgcaaatatcattattcactgcagacttccataagagtaaataaaaatgaatatgcagtggcgacattgttttataagtcactggtactatggacaactccatagtgaatggagatacttgcagagcttgtcatgcacactaagagtttaaaatgtgagctcattattaatcatagtttcaaaattatcaaataaaaccagtgaagatctgaagatgcaaacatttcaactatgaagatttacatttcactttctaatttattaaacatctgtgtgcctttttatctttggtttcttttaaaaagtatatttaatgcctttacaatacctttaatttattaggatctcagaatcattgtttactatcccttatttgacaaaaagtcaaatgtgtatgttctacctccaacggaaatgtttacaaggtcaagacttaattcaattcagacaagaccaaagttgcttgacttcaattcctgtgcattagtgtgatgatttctgtcacatagcagcattccgattctatgtaactgaatggagatgataagtgctttcccctctttatttaaaaaagattaaaaggaatcaaagaaataatgtatggc

SEQ ID NO: 230 - DNA, 831 bp, Homo sapien
agcttccagtttgcaaaccccaattccttcttcctcatcccaatgtatgtatggaacttccaaccagtatccagctcaagaaaccctggactcccatggaacaagcagtagagaaatggtgtcctctttaccacctatcaacactgtgttcatgggaacagcagctggaggcacttaaaccaccaatgtgggagggggtgctaaaactttaaaaaaaatctctactgtgcaaatatcattattcactcagacttccataagagtaaataaaaatgaatatgcagtggctgacattgttttaaagtcactggtactatggacaactccatagtgaatggagatacttgcagagcttgtcatgcacactaagagtttaaaatgtgagctcattattaatcatagtttcaaaattatcaaataaaaccagtgaagatctgaagatgcaaacatttcaactatgaagatttacatttcactttctaatttattaaacatctgtgtgcctttttatctttggtttcttttaaaaagtatatttaatgcctttacaatacctttaatttattaggatctcagaatcattgtttactatcccttatttgacaaaaagtcaaatgtgtatgttctacctccaacggaaatgtttacaaggtcaagacttaattcaattcagacaagaccaaagttgcttgacttcaattcctgtgcattagtgtgatgatttctgtcacatagcagcattccgattctatgtaactgaatggagatgataagtgctttcccctctttatttaaaaaagattaaaaggaataaaagaaataatgtatgga

SEQ ID NO: 231 - DNA, 333 bp, Homo sapien
ggaactagctggatctaggtaaagccagccagactgttggtatgtataatgaaggaaagaggagtcaaggatgatgccagtgttacatcgcccaaatgagaaagaaagtcatttggcagggagaatttggttttattcatgttaagttttaagatgcttgtcagaagttgaagaggaagtgtcaagtatgtatttgcatataaaatctggagctcaggcagaaatgattcaagtattattactgggcagatccaaacgtttagaagtcaggaagaagagaacccagtaaagatactaaggaggaacaataattgagctgtaaggccgggatta

SEQ ID NO: 232 - DNA, 435 bp, Homo sapien
ttttggaggataagaggagaaacaggcagactggttaggaggctattgcagtaatccaagtaaaagatgatggtggccgggtatctagtggttgaaatgatgagaactagctggatctaggtaaagccagccagactgttggtatgtataatgaaggaaagaggagtcaaggatgatgccagtgttacatcgcccaaatgagaaagaaagtcatttggcagggagaatttggttttattcatgttaagttttaagatgcttgtcagaagttgaagaggaagtgtcaagtatgtatttgcatataaaatctggagctcaggcagaaatgattcaagtattattactgggcagatccaaacgtttagaagtcaggaagaagagaacccagtaaagatactaaggaggaacaataattgagctgtaaggccgggtgca

SEQ ID NO: 233 - DNA, 492 bp, Homo sapien
gatgaatcctacatcagtgaactgggcatgggctcagcaatgcccaattgaccgtgtgtgtccttgtatggagatggctggccccgaagctccccagagggattggtgctagaacatggatggggactttgaaagagggggcgggtgacggaggaaacgtgtagggccattcgtgccttccgggtgcattcctcatggccagtcgcagacatgtctctaaccttactccaggctcctgcttctcaggcgtggtgtccatcacatgccgccctgcgaatgttgagggtgtgggctctcgtgtgggagttagaagacctgggtttttgtccagctttgccattcatcacctccatgactctgggcacatcagggtccttcgtggtctcagtttcctctttgtgtaaaatgggaattatggttgtttaaccttctcagcagatggcaggaaagggacacagccggcgcatgattgtgggaggctcagggatggag

SEQ ID NO: 234 - DNA, 1808 bp, Homo sapien
  misc_feature (1690)..(1690): n=a,c,g or t
gatgaatcctacatcagtgaactgggcatgggctcagcaatgcccaattgaccgtgtgtgtccttgtatggagatggctggccccgaagctccccagagggattggtgctagaacatggatggggactttgaaagagggggcgggtgacggaggaaacgtgtagggccattcgtgccttccgggtgcattcctcatggccagtcgcagacatgtctctaaccttactccaggctcctgcttctcaggcgtggtgtccatcacatgccgccctgcgaatgttgagggtgtgggctctcgtgtgggagttagaagacctgggtttttgtccagctttgccattcatcacctccatgactctgggcacatcagggtccttcgtggtctcagtttcctctttgtgtaaaatgggaattatggttgtttaaccttctcagcagatggcaggaaagggacacagccggcgctgatgctgggaggcctccagggatggagagtggcctggctggcaacggcacaggagctgggctggtgatgaaggtcaagcaggagaagccggagcggctgctgcagacgctggcgccgcaggccatgcttgtggagaaggacaaggagaacatctttcagcagcaccggggcctcccgccacgccagaccatggggctggcctcgagccctggggggacaggaggagtctgggagtccaaggtgggcccctcccactgagcagtgatgcggggctggcagtgcctgggctcccgggtcagcctccggccccctggagcccctcgctttcctccggcgagggtcactttgtatgcctggactgcgggaagaggttcagctggtggtcgtccctgaagatccaccagcgcacccacaccggggagaagccgtacctctgcggcaagtgcggcaagagcttcagccagaagccgaacctggcgcgccaccagcggcaccacacgggcgagcgacccttctgctgccccgagtgcgcgcggcgcttcagccagaagcagcacctgctcaagcaccagaagacccactcccggcccgccacccactcgtgccccgagtgcgagcgctgcttccgtcaccaggtgggcctccgcatccaccagcgcgcgcacgcccgggaccgccagggctcccgcgccggcctgcacgagctgattcaggacgcggcggcgcgccgggcctgtcgcctgcagccggggccgccgcgggggcgccccgagtgggcctggctggggctctgccagggctggtggggccagcccggggcccgggccgcggtctccggccccgaggggccgggcgagccgcgccagttcatctgcaacgagtgtggcaagagcttcacctggtggtcgtcgctgaacatccaccagcgcatccacactggcgagcgcccctatgcgtgccccgagtgcggccgccgcgttcagccagaagcccaacttgacgcggcacctgcgcaaccacacaggcgaagcgcccggacccctgcccgcactgtggccgcggcttcagccagaagcagcacctgctcaagcaccagcgcgtgcaccgcgcggcccctgcgtgcagccccaaggaggaggcgcgctagtggactggacctcagcggacccgtggtggtgcgggggatgtttgcggggtgtgtgtggggatgtgggggtggccagnattgctggctcctagaacccattagagcggaaccggtgtattccttaatgctctgaatggctgagaacagttctagaaccgtcccatagggtgctggtaaaggtcccagcgtgggttg

SEQ ID NO: 235 - DNA, 1271 bp, Homo sapien
gagggctttcctggattttgtctgtaggacacctgctgtgccatttcccagacatagcccacctgagcacacaggtagaggcgggtccccaaagacttggcctcccctcattcctgtcctctgtgtttccccctttgaatttctcacttcttcctcttgggtcctcttccttctgtctccatttctgttcttacgtaagccacaggctgcttcccctcgagccctggtatggcccgagacagaggcaccgaggcttgagggaggagctgctctgggaggtcccggacagtggaaggcctgctactacctggagtggctgttaggtcctaatacctcttgggaggcagggtgggtgaagtaggactgtctttgatttgccttgggggtctcgctctgtggagacccaggcccatccttctgtcctcctgaatttgtggcctgggctctgccctcctcggtctgagttccccttaccaaggtggcttctctgtccactagcccctctgcgcctcttcaggtggatgttaagtccagttggtgagaggtttcccaagatgtggcatgcagaagctcacagagtggccccaagggaggagggtggcgagggagggaggagcccccagcacccatcagagccccaccaggggctcctcccgccccctttccccactgctcgccttttctctgcaccacaagcaggttctgtaagaaaccatggtaggcatgcgtacaggcccctgttggggaaatagaattgaaaacaaaatctcttgccaacccagaaaagctctttgcaaaagtagaagagaaaaacagcttttaaaagattgaatgtgcatgaaaccagaatgtggtgcgcaccatggacaatcccccgagcaactgcaaagacgggagctctgagcctgcaataccccaagcgactgcaaagacgggagctctgagcctgcaataccccgagtgactgcaaagacgggagctctgagcctgcaataccccgaatgactgcaaagacgggagctctgagcctgcaatccctgagtaactgcaaagacggaagctctcagcctgcatgtagccggcaggtgcagcccgttacagacatgttctcaggataaacagcaaccagccctccagcaagaggactggacattaccatttgtcacacgcaggcaggtcgtcctaaattcacctcataattggagtgaccatctgtgttagctaattgcctttacccacaggaaaaataaagttcttatatttttatgaca

SEQ ID NO: 236 - DNA, 2520 bp, Homo sapien
ctatagccacaaagtcaaagcgtggaggctcctgtgtggcgctgggggcctctgagattcccaactggctggaaggagtgatggcttaggaggagtgagtggcagcggggacgctggcagagaggcttgtacagatactgcccgatgcatccggctcaggcttgccgccctgtggtgctcctcccaaactcagggagcagggctttctgtcttgctgtaacgtctctccagccagctgcagctcctgctgacttatcccaccccagcgcaggtcatccaacggtgacttatggccccggcctcctggctcgatgaggatggcaggaaagggacacagccggcgctgatgctgggaggcctccagggatggagagtggcctggctggcaacggcacaggagctgggctggtgatgaaggtcaagcaggagaagccggagcggctgctgcagacgctggcgccgcaggccatgcttgtggagaaggacaaggagaacatctttcagcagcaccggggcctcccgccacgccagaccatggggcggcctcgagccctggggggacaggaggagtctgggagtccaaggtgggcccctcccactgagcaggatgcggggctggcaggccgggctcccgggtcagcctccggccccctgagcccctcgctttcctccggcgagggtcactttgtatgcctggactgcgggaagaggttcagctggtggtcgtccctgaagatccaccagcgcacccacaccggggagaagccgtacctctgcggcaagtgcggcaagagcttcagccagaagccgaacctggcgcgccaccagcggcaccacacgggcgagcgacccttctgctgccccgagtgcgcgcggcgcttcagccagaagcagcacctgctcaagcaccagaagacccactcccggcccgccacccactcgtgccccgagtgcgagcgctgcttccgtcaccaggtgggcctccgcatccaccagcgcgcgcacgcccgggaccgccagggctcccgcgccggcctgcacgagctgattcaggacgcggcggcgcgccgggcctgtcgcctgcagccggggccgccgcgggggcgccccgagtgggcctggctggggctctgccagggctggtggggccagcccggggcccgggccgcggtctccggccccgaggggccgggcgagccgcgccagttcatctgcaacgagtgtggcaagagcttcacctggtggtcgtcgctgaacatccaccagcgcatccacactggcgagcgcccctatgcgtgccccgagtgcggccgccgcttcagccagaagcccaacttgacgcggcacctgcgcaaccacacaggcgagcgcccgcacccctgcccgcactgtggccgcggcttccgccagaagcagcacctgctcaagcacctgcgcacgcacctgcccggcgcccaggctgcgccctgccccagctgcggtaagagctgccgcagccgcgccgcgctgcgcgcccaccagcgcgcccacgctgtcgctgagcccgccgttccggccggggaaccgggcgaccagccgcaggccgaggccatcccgggcttggccgcgaggccgcggagctcccaacggtccccgggggcccgggacacactgtggggccggggacaagcgggcctcgctgggcctggcgagccgcgccagttcatctgcaacgagtgcggcaagagcttctcgtggtggtcggcgctcaccatccaccagcgcatccacacgggtgagcggccctacccgtgccccgagtgcggccgccgcttcagccagaagcccaacctgacgcggcaccggcgcaaccacacaggcgagcggccctacctgtgtcccgcctgcggccgcggcttcagccagaagcagcacctgctcaagcaccagcgcgtgcaccgcgcggcccctgcgtgcagccccaaggaggaggcgcgctagtggactggacctcagcggacccgtggtggtgcgggggatgtttgcggggtgtgtgtggggagtgggggtggccaggattgctggctcttagaaccccttagagcgggaccggtggattccttaaggctctgaagggctgagaacagttctagaagcgtcccaaagggtgctgggaaaggtcccagcgtgggttgagggaggagggaagatccgagttcctcaccgcgggccgggatgtgaccaccctcttcagaggttggaccccaggcttcaagcaccgagtgaggggtctgttggggacgctgggagagtctctggtgtgaagtggcttaggtctggactggtcagctgtggcaccagccggtcctgcccacgcttcaggatggccgggggctgcccctgtgggagagttgccaagactcggcgataccaaggatggaagccagaggctgtggcgagggagagccaagcatattcccagcaccagggccactgctggcacgtcgtagacatccaataaatatttttggaaggagtaaa

SEQ ID NO: 237 - DNA, 2489 bp, Homo sapien
ctatagccacaaagtcaaagcgtggaggctcctgtgtggcgctgggggcctctgagattcccaactggctggaaggagtgatggcttaggaggagtgagtggcagcggggacgctggcagagaggcttgtacagatactgcccgatgcatccggctcaggcttgccgccctgtggtgctcctcccaaactcagggagcagccagctgcagctcctgctgacttatcccaccccagcgcaggtcatccaacggtgacttatggccccggcctcctggctcgatgaggatggcaggaaagggacacagccggcgctgatgctgggaggcctccagggatggagagtggcctggctggcaacggcacaggagctgggctggtgatgaaggtcaagcaggagaagccggagcggctgctgcagacgctggcgccgcaggccatgcttgtggagaaggacaaggagaacatctttcagcagcaccggggcctcccgccacgccagaccatggggcggcctcgagccctggggggacaggaggagtctgggagtccaaggtgggcccctcccactgagcaggatgcggggctggcaggccgggctcccgggtcagcctccggccccctgagcccctcgctttcctccggcgagggtcactttgtatgcctggactgcgggaagaggttcagctggtggtcgtccctgaagatccaccagcgcacccacaccggggagaagccgtacctctgcggcaagtgcggcaagagcttcagccagaagccgaacctggcgcgccaccagcggcaccacacgggcgagcgacccttctgctgccccgagtgcgcgcggcgcttcagccagaagcagcacctgctcaagcaccagaagacccactcccggcccgccacccactcgtgccccgagtgcgagcgctgcttccgtcaccaggtgggcctccgcatccaccagcgcgcgcacgcccgggaccgccagggctcccgcgccggcctgcacgagctgattcaggacgcggcggcgcgccgggcctgtcgcctgcagccggggccgccgcgggggcgccccgagtgggcctggctggggctctgccagggctggtggggccagcccggggcccgggccgcggtctccggccccgaggggccgggcgagccgcgccagttcatctgcaacgagtgtggcaagagcttcacctggtggtcgtcgctgaacatccaccagcgcatccacactggcgagcgcccctatgcgtgccccgagtgcggccgccgcttcagccagaagcccaacttgacgcggcacctgcgcaaccacacaggcgagcgcccgcacccctgcccgcactgtggccgcggcttccgccagaagcagcacctgctcaagcacctgcgcacgcacctgcccggcgcccaggctgcgccctgccccagctgcggtaagagctgccgcagccgcgccgcgctgcgcgcccaccagcgcgcccacgctgtcgctgagcccgccgttccggccggggaaccgggcgaccagccgcaggccgaggccatcccgggcttggccgcgaggccgcggagctcccaacggtccccgggggcccgggacacactgtggggccggggacaagcgggcctcgctgggcctggcgagccgcgccagttcatctgcaacgagtgcggcaagagcttctcgtggtggtcggcgctcaccatccaccagcgcatccacacgggtgagcggccctacccgtgccccgagtgcggccgccgcttcagccagaagcccaacctgacgcggcaccggcgcaaccacacaggcgagcggccctacctgtgtcccgcctgcggccgcggcttcagccagaagcagcacctgctcaagcaccagcgcgtgcaccgcgcggcccctgcgtgcagccccaaggaggaggcgcgctagtggactggacctcagcggacccgtggtggtgcgggggatgtttgcggggtgtgtgtggggagtgggggtggccaggattgctggctcttagaaccccttagagcgggaccggtggattccttaaggctctgaagggctgagaacagttctagaagcgtcccaaagggtgctgggaaaggtcccagcgtgggttgagggaggagggaagatccgagttcctcaccgcgggccgggatgtgaccaccctcttcagaggttggaccccaggcttcaagcaccgagtgaggggtctgttggggacgctgggagagtctctggtgtgaagtggcttaggtctggactggtcagctgtggcaccagccggtcctgcccacgcttcaggatggccgggggctgcccctgtgggagagttgccaagactcggcgataccaaggatggaagccagaggctgtggcgagggagagccaagcatattcccagcaccagggccactgctggcacgtcgtagacatccaataaatatttttggaaggagtaaa

SEQ ID NO: 238 - DNA, 2457 bp, Homo sapien
tggccagggccgggagcccggtgcccaagtcgccctcggggtggcagttcccgttaaccttagccacaaagtcaaagatggcaggaaagggacacagccggcgctgatgctgggaggcctccagggatggagagtggcctggctggcaacggcacaggagctgggctggtgatgaaggtcaagcaggagaagccggagcggctgctgcagacgctggcgccgcaggccatgcttgtggagaaggacaaggagaacatctttcagcagcaccggggcctcccgccacgccagaccatggggcggcctcgagccctggggggacaggaggagtctgggagtccaaggtgggcccctcccactgagcaggatgcggggctggcaggccgggctcccgggtcagcctccggccccctgagcccctcgctttcctccggcgagggtcactttgtatgcctggactgcgggaagaggttcagctggtggtcgtccctgaagatccaccagcgcacccacaccggggagaagccgtacctctgcggcaagtgcggcaagagcttcagccagaagccgaacctggcgcgccaccagcggcaccacacgggcgagcgacccttctgctgccccgagtgcgcgcggcgcttcagccagaagcagcacctgctcaagcaccagaagacccactcccggcccgccacccactcgtgccccgagtgcgagcgctgcttccgtcaccaggtgggcctccgcatccaccagcgcgcgcacgcccgggaccgccagggctcccgcgccggcctgcacgagctgattcaggacgcggcggcgcgccgggcctgtcgcctgcagccggggccgccgcgggggcgccccgagtgggcctggctggggctctgccagggctggtggggccagcccggggcccgggccgcggtctccggccccgaggggccgggcgagccgcgccagttcatctgcaacgagtgtggcaagagcttcacctggtggtcgtcgctgaacatccaccagcgcatccacactggcgagcgcccctatgcgtgccccgagtgcggccgccgcttcagccagaagcccaacttgacgcggcacctgcgcaaccacacaggcgagcgcccgcacccctgcccgcactgtggccgcggcttccgccagaagcagcacctgctcaagcacctgcgcacgcacctgcccggcgcccaggctgcgccctgccccagctgcggtaagagctgccgcagccgcgccgcgctgcgcgcccaccagcgcgcccacgctgtcgctgagcccgccgttccggccggggaaccgggcgaccagccgcaggccgaggccatcccgggcttggccgcgaggccgcggagctcccaacggtccccgggggcccgggacacactgtggggccggggacaagcgggcctcgctgggcctggcgagccgcgccagttcatctgcaacgagtgcggcaagagcttctcgtggtggtcggcgctcaccatccaccagcgcatccacacgggtgagcggccctacccgtgccccgagtgcggccgccgcttcagccagaagcccaacctgacgcggcaccggcgcaaccacacaggcgagcggccctacctgtgtcccgcctgcggccgcggcttcagccagaagcagcacctgctcaagcaccagcgcgtgcaccgcgcggcccctgcgtgcagccccaaggaggaggcgcgctagtggactggacctcagcggacccgtggtggtgcgggggatgtttgcggggtgtgtgtggggagtgggggtggccaggattgctggctcttagaaccccttagagcgggaccggtggattccttaaggctctgaagggctgagaacagttctagaagcgtcccaaagggtgctgggaaaggtcccagcgtgggttgagggaggagggaagatccgagttcctcaccgcgggccgggatgtgaccaccctcttcagaggttggaccccaggcttcaagcaccgagtgaggggtctgttggggacgctgggagagtctctggtgtgaagtggcttaggtctggactggtcagctgtggcaccagccggtcctgcccacgcttcaggatggccgggggctgcccctgtgggagagttgccaagactcggcgataccaaggatggaagccagaggctgtggcgagggagagccgcgccagttcatctgcaacgagtgtggcaagagcttcacctggtggtcgtcgctgaacgtgcaccagcgcacgcacaccggggagcggcccttcccctgccccgagtgcggccgctgcttcagcctcaagcagaacctgctcacgcaccagcgcatccacagcggcgagaagccgcaccagtgcgcgcagtgcggccgctgcttccgcgagccgcgcttcctgctcaaccaccagcgcacccacgcgcgc

SEQ ID NO: 239 - DNA, 2120 bp, Homo sapien
tggccagggccgggagcccggtgcccaagtcgccctcggggtggcagttcccgttaaccttagccacaaagtcaaagatggcaggaaagggacacagccggcgctgatgctgggaggcctccagggatggagagtggcctggctggcaacggcacaggagctgggctggtgatgaaggtcaagcaggagaagccggagcggctgctgcagacgctggcgccgcaggccatgcttgtggagaaggacaaggagaacatctttcagcagcaccggggcctcccgccacgccagaccatggggcggcctcgagccctggggggacaggaggagtctgggagtccaaggtgggcccctcccactgagcaggatgcggggctggcaggccgggctcccgggtcagcctccggccccctgagcccctcgctttcctccggcgagggtcactttgtatgcctggactgcgggaagaggttcagctggtggtcgtccctgaagatccaccagcgcacccacaccggggagaagccgtacctctgcggcaagtgcggcaagagcttcagccagaagccgaacctggcgcgccaccagcggcaccacacgggcgagcgacccttctgctgccccgagtgcgcgcggcgcttcagccagaagcagcacctgctcaagcaccagaagacccactcccggcccgccacccactcgtgccccgagtgcgagcgctgcttccgtcaccaggtgggcctccgcatccaccagcgcgcgcacgcccgggaccgccagggctcccgcgccggcctgcacgagctgattcaggacgcggcggcgcgccgggcctgtcgcctgcagccggggccgccgcgggggcgccccgagtgggcctggctggggctctgccagggctggtggggccagcccggggcccgggccgcggtctccggccccgaggggccgggcgagccgcgccagttcatctgcaacgagtgtggcaagagcttcacctggtggtcgtcgctgaacatccaccagcgcatccacactggcgagcgcccctatgcgtgccccgagtgcggccgccgcttcagccagaagcccaacttgacgcggcacctgcgcaaccacacaggcgagcgcccgcacccctgcccgcactgtggccgcggcttccgccagaagcagcacctgctcaagcacctgcgcacgcacctgcccggcgcccaggctgcgccctgccccagctgcggtaagagctgccgcagccgcgccgcgctgcgcgcccaccagcgcgcccacgctgtcgctgagcccgccgttccggccggggaaccgggcgaccagccgcaggccgaggccatcccgggcttggccgcgaggccgcggagctcccaacggtccccgggggcccgggacacactgtggggccggggacaagcgggcctcgctgggcctggcgagccgcgccagttcatctgcaacgagtgcggcaagagcttctcgtggtggtcggcgctcaccatccaccagcgcatccacacgggtgagcggccctacccgtgccccgagtgcggccgccgcttcagccagaagcccaacctgacgcggcaccggcgcaaccacacaggcgagcggccctacctgtgtcccgcctgcggccgcggcttcagccagaagcagcacctgctcaagcaccagcgcgtgcaccgcgcggcccctgcgtgcagccccaaggaggaggcgcgctagtggactggacctcagcggacccgtggtggtgcgggggatgtttgcggggtgtgtgtggggagtgggggtggccaggattgctggctcttagaaccccttagagcgggaccggtggattccttaaggctctgaagggctgagaacagttctagaagcgccacccactcgtgccccgagtgcgagcgctgcttccgtcaccaggtgggcctccgcatcaccagcgcgcgcacgcccgggaccgccagggctcccgcgccggcctgcacgagctgattcaggacgcggctgtgtgcgccggggcctgtcgcctgcagccggggccgccgcgggggcgcccggagtgggcctggctggggctctgccagggcctggtggggcca

SEQ ID NO: 240 - DNA, 806 bp, Homo sapien
ctatagccacaaagtcaaagcgtggaggctcctgtgtggcgctgggggcctctgagattcccaactggctggaaggagtgatggcttaggaggagtgagtggcagcggggacgctggcagagaggcttgtacagatactgcccgatgcatccggctcaggcttgccgccctgtggtgctcctcccaaactcagggagcagggctttctgtcttgctgtaacgtctctccagccagctgcagctcctgctgacttatcccaccccagcgcaggtcatccaacggtgacttatggccccggcctcctggctcgatgaggaaaagctctttgcaaaagtagaagagaaaaacagcttttaaaagattgaatgtgcatgaaaccagaatgtggtgcgcaccatggacaatcccccgagcaactgcaaagacgggagctctgagcctgcaataccccaagcgactgcaaagacgggagctctgagcctgcaataccccgagtgactgcaaagacgggagctctgagcctgcaataccccgaatgactgcaaagacgggagctctgagcctgcaatccctgagtaactgcaaagacggaagctctcagcctgcatgtagccggcaggtgcagcccgttacagacatgttctcaggataaacagcaaccagccctccagcaagaggactggacattaccatttgtcacacgcaggcaggtcgtcctaaattcacctcataattggagtgaccatctgtgttagctaattgcctttacccacaggaaaaataaagttcttatatttttatgaca

SEQ ID NO: 241 - DNA, 757 bp, Homo sapien
agatgaatcctacatcagtgaactgggcatgggctcagcaatgcccaattgaccgtgtgtgttcttgtatggagatggctggccccgaagctccccagagggatttgtgctagaacatggatggggactttgaaagagggggcgggtgacggaggaaacgtgtagggccattctgccttccgggtgcattcctcatggccagtcgcagacatgtctctaaccttactccaggctcctgcttctcaggcgtggtgtccatcacatgccgccctgcgaatgttgagggtgtgggctctcgtgtgggagttagaagacctgggtttttgtccagctctgccattcatcacctccatgactctgggcacatcaggggtccttcgtggtctcagtttcctcttttgtaaaatgggaattatggctgttttaccttctcagcagatggcaggaaagggacacagccggcgctgatgctgggaggcctccagggatggagagtggcctggctggcaacggcacaggagctgggctggtgatgaaggtcaagcaggagaagccggagcggctgctgcagacgctggcgccgcaggccatgcttgtggagaaggacaaggagaatgttttgtggaccactttggttttcttttttgcgtgtggcagttttaagttattagtttttaaaatcagtactttttaatggaaacaacttgaccaaaaatttgtcacagaattttgagacccattaaaaaagttaaatgag

SEQ ID NO: 242 - DNA, 2280 bp, Homo sapien
tggccagggccgggagcccggtgcccaagtcgccctcggggtggcagttcccgttaaccttagccacaaagtcaaagatggcaggaaagggacacagccggcgctgatgctgggaggcctccagggatggagagtggcctggctggcaacggcacaggagctgggctggtgatgaaggtcaagcaggagaagccggagcggctgctgcagacgctggcgccgcaggccatgcttgtggagaaggacaaggagaacatctttcagcagcaccggggcctcccgccacgccagaccatggggcggcctcgagccctggggggacaggaggagtctgggagtccaaggtgggcccctcccactgagcaggatgcggggctggcaggccgggctcccgggtcagcctccggccccctgagcccctcgctttcctccggcgagggtcactttgtatgcctggactgcgggaagaggttcagctggtggtcgtccctgaagatccaccagcgcacccacaccggggagaagccgtacctctgcggcaagtgcggcaagagcttcagccagaagccgaacctggcgcgccaccagcggcaccacacgggcgagcgacccttctgctgccccgagtgcgcgcggcgcttcagccagaagcagcacctgctcaagcaccagaagacccactcccggcccgccacccactcgtgccccgagtgcgagcgctgcttccgtcaccaggtgggcctccgcatccaccagcgcgcgcacgcccgggaccgccagggctcccgcgccggcctgcacgagctgattcaggacgcggcggcgcgccgggcctgtcgcctgcagccggggccgccgcgggggcgccccgagtgggcctggctggggctctgccagggctggtggggccagcccggggcccgggccgcggtctccggccccgaggggccgggcgagccgcgccagttcatctgcaacgagtgtggcaagagcttcacctggtggtcgtcgctgaacatccaccagcgcatccacactggcgagcgcccctatgcgtgccccgagtgcggccgccgcttcagccagaagcccaacttgacgcggcacctgcgcaaccacacaggcgagcgcccgcacccctgcccgcactgtggccgcggcttccgccagaagcagcacctgctcaagcacctgcgcacgcacctgcccggcgcccaggctgcgccctgccccagctgcggtaagagctgccgcagccgcgccgcgctgcgcgcccaccagcgcgcccacgctgtcgctgagcccgccgttccggccggggaaccgggcgaccagccgcaggccgaggccatcccgggcttggccgcgaggccgcggagctcccaacggtccccgggggcccgggacacactgtggggccggggacaagcgggcctcgctgggcctggcgagccgcgccagttcatctgcaacgagtgcggcaagagcttctcgtggtggtcggcgctcaccatccaccagcgcatccacacgggtgagcggccctacccgtgccccgagtgcggccgccgcttcagccagaagcccaacctgacgcggcaccggcgcaaccacacaggcgagcggccctacctgtgtcccgcctgcggccgcggcttcagccagaagcagcacctgctcaagcaccagcgcgtgcaccgcgcggcccctgcgtgcagccccaaggaggaggcgcgctagtggactggacctcagcggacccgtggtggtgcgggggatgtttgcggggtgtgtgtggggagtgggggtggccaggattgctggctcttagaaccccttagagcgggaccggtggattccttaaggctctgaagggctgagaacagttctagaagcgtcccaaagggtgctgggaaaggtcccagcgtgggttgagggaggagggaagatccgagttcctcaccgcgggccgggatgtgaccaccctcttcagaggttggaccccaggcttcaagcaccgagtgaggggtctgttggggacgctgggagagtctctggtgtgaagtggcttaggtctggactggtcagctgtggcaccagccggtcctgcccacgcttcaggatggccgggggctgcccctgtgggagagttgccaagactcggcgataccaaggatggaagccagaggctgtggcgagggagagccaagcatattcccagcaccagggccactgctggcacgtcgtagacatccaataaatatttttggaaggagtaaa

SEQ ID NO: 243 - DNA, 2641 bp, Homo sapien
agatgaatcctacatcagtgaactgggcatgggctcagcaatgcccaattgaccgtgtgtgttcttgtatggagatggctggccccgaagctccccagagggatttgtgctagaacatggatggggactttgaaagagggggcgggtgacggaggaaacgtgtagggccattctgccttccgggtgcattcctcatggccagtcgcagacatgtctctaaccttactccaggctcctgcttctcaggcgtggtgtccatcacatgccgccctgcgaatgttgagggtgtgggctctcgtgtgggagttagaagacctgggtttttgtccagctctgccattcatcacctccatgactctgggcacatcaggggtccttcgtggtctcagtttcctcttttgtaaaatgggaattatggctgttttaccttctcagcagatggcaggaaagggacacagccggcgctgatgctgggaggcctccagggatggagagtggcctggctggcaacggcacaggagctgggctggtgatgaaggtcaagcaggagaagccggagcggctgctgcagacgctggcgccgcaggccatgcttgtggagaaggacaaggagaacatctttcagcagcaccggggcctcccgccacgccagaccatggggcggcctcgagccctggggggacaggaggagtctgggagtccaaggtgggcccctcccactgagcaggatgcggggctggcaggccgggctcccgggtcagcctccggccccctgagcccctcgctttcctccggcgagggtcactttgtatgcctggactgcgggaagaggttcagctggtggtcgtccctgaagatccaccagcgcacccacaccggggagaagccgtacctctgcggcaagtgcggcaagagcttcagccagaagccgaacctggcgcgccaccagcggcaccacacgggcgagcgacccttctgctgccccgagtgcgcgcggcgcttcagccagaagcagcacctgctcaagcaccagaagacccactcccggcccgccacccactcgtgccccgagtgcgagcgctgcttccgtcaccaggtgggcctccgcatccaccagcgcgcgcacgcccgggaccgccagggctcccgcgccggcctgcacgagctgattcaggacgcggcggcgcgccgggcctgtcgcctgcagccggggccgccgcgggggcgccccgagtgggcctggctggggctctgccagggctggtggggccagcccggggcccgggccgcggtctccggccccgaggggccgggcgagccgcgccagttcatctgcaacgagtgtggcaagagcttcacctggtggtcgtcgctgaacatccaccagcgcatccacactggcgagcgcccctatgcgtgccccgagtgcggccgccgcttcagccagaagcccaacttgacgcggcacctgcgcaaccacacaggcgagcgcccgcacccctgcccgcactgtggccgcggcttccgccagaagcagcacctgctcaagcacctgcgcacgcacctgcccggcgcccaggctgcgccctgccccagctgcggtaagagctgccgcagccgcgccgcgctgcgcgcccaccagcgcgcccacgctgtcgctgagcccgccgttccggccggggaaccgggcgaccagccgcaggccgaggccatcccgggcttggccgcgaggccgcggagctcccaacggtccccgggggcccgggacacactgtggggccggggacaagcgggcctcgctgggcctggcgagccgcgccagttcatctgcaacgagtgcggcaagagcttctcgtggtggtcggcgctcaccatccaccagcgcatccacacgggtgagcggccctacccgtgccccgagtgcggccgccgcttcagccagaagcccaacctgacgcggcaccggcgcaaccacacaggcgagcggccctacctgtgtcccgcctgcggccgcggcttcagccagaagcagcacctgctcaagcaccagcgcgtgcaccgcgcggcccctgcgtgcagccccaaggaggaggcgcgctagtggactggacctcagcggacccgtggtggtgcgggggatgtttgcggggtgtgtgtggggagtgggggtggccaggattgctggctcttagaaccccttagagcgggaccggtggattccttaaggctctgaagggctgagaacagttctagaagcgtcccaaagggtgctgggaaaggtcccagcgtgggttgagggaggagggaagatccgagttcctcaccgcgggccgggatgtgaccaccctcttcagaggttggaccccaggcttcaagcaccgagtgaggggtctgttggggacgctgggagagtctctggtgtgaagtggcttaggtctggactggtcagctgtggcaccagccggtcctgcccacgcttcaggatggccgggggctgcccctgtgggagagttgccaagactcggcgataccaaggatggaagccagaggctgtggcgagggagagccaagcatattcccagcaccagggccactgctggcacgtcgtagacatccaataaatatttttggaaggagtaaa

SEQ ID NO: 244 - DNA, 2321 bp, Homo sapien
agtttctggaagccttggtgcagtaatttttttctttataatagttttggttttaatgcaaagagaagtaagtgttcaatattccaatagaggaatcaaggatggataaggaacatgtaaatactttacaagatgttggatttaatgctagaagctgtaaacaatattaaggatgccatgccaaaaatgcaaataggagcacctgtcaggcaataacattgatgtctggtgagagaccttgtttgcaaggatattatacagcagcagtaattgaagcctgtccttgaccgtccacctcaggattctaaatgcacctggtgcttctggtaatagcattcaagactaaccaatttaagtgttgtaagagcaaaaggtaataaggacgtggggaagtctaaacactgctttaatgctttcgcaagtgacaggagttctttgcaccgagatcttggaccagacactcgacctcctgaatgtattgtactatataatttaagcgctgcgggaagaggttcagctggtggtcgtccctgaagatccaccagcgcacccacaccggggagaagccgtacctctgcggcaagtgcggcaagagcttcagccagaagccgaacctggcgcgccaccagcggcaccacacgggcgagcgacccttctgctgccccgagtgcgcgcggcgcttcagccagaagcagcacctgctcaagcaccagaagacccactcccggcccgccacccactcgtgccccgagtgcgagcgctgcttccgtcaccaggtgggcctccgcatccaccagcgcgcgcacgcccgggaccgccagggctcccgcgccggcctgcacgagctgattcaggacgcggcggcgcgccgggcctgtcgcctgcagccggggccgccgcgggggcgccccgagtgggcctggctggggctctgccagggctggtggggccagcccggggcccgggccgcggtctccggccccgaggggccgggcgagccgcgccagttcatctgcaacgagtgtggcaagagcttcacctggtggtcgtcgctgaacatccaccagcgcatccacactggcgagcgcccctatgcgtgccccgagtgcggccgccgcttcagccagaagcccaacttgacgcggcacctgcgcaaccacacaggcgagcgcccgcacccctgcccgcactgtggccgcggcttccgccagaagcagcacctgctcaagcacctgcgcacgcacctgcccggcgcccaggctgcgccctgccccagctgcggtaagagctgccgcagccgcgccgcgctgcgcgcccaccagcgcgcccacgctgtcgctgagcccgccgttccggccggggaaccgggcgaccagccgcaggccgaggccatcccgggcttggccgcgaggccgcggagctcccaacggtccccgggggcccgggacacactgtggggccggggacaagcgggcctcgctgggcctggcgagccgcgccagttcatctgcaacgagtgcggcaagagcttctcgtggtggtcggcgctcaccatccaccagcgcatccacacgggtgagcggccctacccgtgccccgagtgcggccgccgcttcagccagaagcccaacctgacgcggcaccggcgcaaccacacaggcgagcggccctacctgtgtcccgcctgcggccgcggcttcagccagaagcagcacctgctcaagcaccagcgcgtgcaccgcgcggcccctgcgtgcagccccaaggaggaggcgcgctagtggactggacctcagcggacccgtggtggtgcgggggatgtttgcggggtgtgtgtggggagtgggggtggccaggattgctggctcttagaaccccttagagcgggaccggtggattccttaaggctctgaagggctgagaacagttctagaagcgtcccaaagggtgctgggaaaggtcccagcgtgggttgagggaggagggaagatccgagttcctcaccgcgggccgggatgtgaccaccctcttcagaggttggaccccaggcttcaagcaccgagtgaggggtctgttggggacgctgggagagtctctggtgtgaagtggcttaggtctggactggtcagctgtggcaccagccggtcctgcccacgcttcaggatggccgggggctgcccctgtgggagagttgccaagactcggcgataccaaggatggaagccagaggctgtggcgagggagagccaagcatattcccagcaccagggccactgctggcacgtcgtagacatccaataaatatttttggaaggagtaaa

SEQ ID NO: 245 - DNA, 1263 bp, Homo sapien
tggccagggccgggagcccggtgcccaagtcgccctcggggtggcagttcccgttaaccttagccacaaagtcaaagatggcaggaaagggacacagccggcgctgatgctgggaggcctccagggatggagagtggcctggctggcaacggcacaggagctgggctggtgatgaaggtcaagcaggagaagccggagcggctgctgcagacgctggcgccgcaggccatgcttgtggagaaggacaaggagaacatctttcagcagcaccggggcctcccgccacgccagaccatggggcggcctcgagccctggggggacaggaggagtctgggagtccaaggtgggcccctcccactgagcaggatgcggggctggcaggccgggctcccgggtcagcctccggccccctgagcccctcgctttcctccggcgagggtcactttgtatgcctggactgcgggaagaggttcagctggtggtcgtccctgaagatccaccagcgcacccacaccggggagaagccgtacctctgcggcaagtgcggcaagagcttcagccagaagccgaacctggcgcgccaccagcggcaccacacgggcgagcgacccttctgctgccccgagtgcgcgcggcgcttcagccagaagcagcacctgctcaagcaccagcgcgtgcaccgcgcggcccctgcgtgcagccccaaggaggaggcgcgctagtggactggacctcagcggacccgtggtggtgcgggggatgtttgcggggtgtgtgtggggagtgggggtggccaggattgctggctcttagaaccccttagagcgggaccggtggattccttaaggctctgaagggctgagaacagttctagaagcgtcccaaagggtgctgggaaaggtcccagcgtgggttgagggaggagggaagatccgagttcctcaccgcgggccgggatgtgaccaccctcttcagaggttggaccccaggcttcaagcaccgagtgaggggtctgttggggacgctgggagagtctctggtgtgaagtggcttaggtctggactggtcagctgtggcaccagccggtcctgcccacgcttcaggatggccgggggctgcccctgtgggagagttgccaagactcggcgataccaaggatggaagccagaggctgtggcgagggagagccaagcatattcccagcaccagggccactgctggcacgtcgtagacatccaataaatatttttggaaggagtaaa

SEQ ID NO: 246 - DNA, 336 bp, Homo sapien
cttccaatgagattgatttcagactagcataagtacagggcattgacacgcaaccagagcataagggaaaatgaaatcaatttcatctctcctcactcagtgtaccttcccaataattcaataggaagtactccttctcttcctgtcactgtcacacatgctccctgagcagaatctagcagctcatcttctgctatctgcaaatggtcattgcttctaggttactctaatgaagcagaaaattccacttcaggaagttttctcaccatgagactaaaatgtactgtgttgctattgttactattagctctgtttacctgaagagatagtggaagc

SEQ ID NO: 247 - DNA, 336 bp, Homo sapien
cttccaatgagattgatttcagactagcataagtacagggcattgacacgcaaccagagcataagggaaaatgaaatcaatttcatctctcctcactcagtgtaccttcccaataattcaataggaagtactccttctcttcctgtcactgtcacacatgctccctgagcagaatctagcagctcatcttctgctatctgcaaatggtcattgcttctaggttactctaatgaagcagaaaattccacttcaggaagttttctcaccatgagactaaaatgtactgtgttgctattgttactattagttctgtttacctgaagagatagtggaagc

SEQ ID NO: 248 - DNA, 528 bp, Homo sapien
agtgctgcccggttcactttggctccacgtgacttctgctcatttaagcttcacagtatgtggtagcaaaaggttttctagaattttctggatgttaacatgcttaatacaagttctttgtctttaggaaccatatttctatttctacaaatctcatagccttgttgtattgtatgcactgtaggcaatgggaaaataagtattcaatgaatgtcagtgagaaaagaaagaaacgagggctatttgtgtattactcattcaaatggaaggaccagggacatggaatgaattatattttccatattttatgtatttcttatttatttttataataaattatgaatggtttaaggctgctaaatattcttcttaggttcctttggaaaaggcaagagttcctgaagttgtagcacatttcaatagctacatagcattacgcttgtcaattaattagaccatttggcttcaagagttgctggtaaactctatttatgtattctcttttttcatgtcttaagagtgagactc

SEQ ID NO: 249 - DNA, 528 bp, Homo sapien; identical to SEQ ID NO: 248

SEQ ID NO: 250 - DNA, 1005 bp, Homo sapien
  misc_feature (354)..(436): n=a,c,g or t
cgcagtgcagcagcgggggccgcacccacagccctggccgtgcagaggtggagcgcctcttcgggcaagagcgcagttctacatgggggaaaaaaggaaggcgagttctcaggaggaatgctcatcaagcaagctggagttcgtatggaaaatgcatccatccggaagagaacacacaagtgccttgcttccctgcaccgggtgtttccactattgtcctcctggtcctccccattagggaggaacagcccactgggtcacgtctgggctcttgcttcatcgaagctcctataccccagttcgggggaaaattcactctaaggccttcagctctcacagagtaaggaaacgcannnnnnnnnnnnnnnnnnnnnnnnnnnnnnnnnnnnnnnnnnnnnnnnnnnnnnnnnnnnnnnnnnnnnnnnnnnnnnnnnnnactacctaggaatttttgatttgcagttgacttgctgtgggttacacttaggaattttgattctgctgtttctctttgtattttgcagtcagttcccttcctcccaccatattcctgttatttctagggccttgggaggtttgttggcataggtactgtgtctgtggtactaatggattatgtcagtctgttcttaaaacccttccatggctttccattgattttaggatgaaggtcagttgaagtccttaacctggtcctgtgtgttgtggcttttttctgtctgctgcctaacaaagcccccaggcttagtagctttaaagaaaaccaatgatttgttattgctcatcattttgtgagttggccagatagttcttaggctggtttcacctgggcttactcatctgccgagttcacctgggtggtggttgagctggaagttctgatgtgacttccttcacatgtctctggccttggtactggctgtcctctgaggcaccttggtgtcttttccacaatggtttattttcctccagtaggctagactggcttccttatttggcagtttc

SEQ ID NO: 251 - DNA, 605 bp, Homo sapien
tgctgggattatagacgtgagccactacacctggtcactacctaggaatttttgatttgcagttgacttgctgtgggttacgcttaggaattttgattctgctgtttctctttgtattttgcagtcagttcccttcctcccaccatattcctgttatttctagggccttgggaggtttgttggcataggtactgtgtctgtggtactaatggattatgtcagtctgttcttaaaacccttccatggctttccattgattttaggatgaaggtcagttgaagtccttaacctggtcctgtgtgttgtggcttttttctgtctgctgcctaacaaagcccccaggcttagtagctttaaagaaaaccaatgatttgttattgctcatcattttgtgagttggccagatagttcttaggctggtttcacctgggcttactcatctgccgagttcacctgggtggtggttgagctggaagttctgatgtgacttccttcacatgtctctggccttggtactggctgtcctctgaggcaccttggtgtcttttccacaatggtttattttcctccagtaggctagactggcttccttatttggcagtttc

SEQ ID NO: 252 - DNA, 2671 bp, Homo sapien
  misc_feature (84)..(84): n=a,c,g or t
  misc_feature (2409)..(2409): n=a,c,g or t
aagctttttttattaaaggaaaaatgggtacagaatactctattgccctccaaatgtccgacatttttaaagccatgttgtccnacaatgtttatacagaaaatagaatgcataggtttaatatagatagcatgtatatgtaggctcatttgtgggagattgcaactttatgtgcccccagttctccttggttttgtaggaaagctaaaagaaaaccttgtactctcactaataatgaaattcatagccatttagaaagggaaaataacctgaaaaccagaatacctcattcatctgaagatgcctggaataaaatatggaattcttctgtacctacctcccccttacagacttttctcctattttgagagagaaattcaagaagaagaatacagcttgttctctttccacaatgatactttgtctaagggaataggagataccaagaaacagtatctttaaaaaagtaagctgcccacaggccttcttggagaatgaagaatatcagccccattcagggtttaccaatgtctctctgaggtgacaatacattctggttttccaggacagtcctggcttaggtctgctgtccttctataaatattaacaatgatccctcttatttccaaacgtgtcccagtttagacaacaaattatacagtgtctgcccccaacacacacacacacaccccaccatctttatgggttgttgttgttttcttgttgtttttaattttgtagaattggctttgtcttctccaaagcagataacagcttaaactaaagagcctagctacttctttctgactgagcagggtcatagtaaacagagaagaatggatcacttcctcctctgaaatctccatcaatccactttctgtccaactatctctctacccagcctatttttggtcctagttttcctctcataacccctgggctgtgagtcctgagttctgccttcatatggcagagcaagctagtcattattatgccaggttaggtggtggggcaagacaaaagatagctcttggggacacttgcttggtctgtagagatccacagggcactagtagggtattagagcatttattggtttctttcttccttgagttgagttacttctatcccaaaacagacaggtcttacgttaaccttcaccttaaaaaggatattgccttttttccttctgcttcacaaatttgctccaacactaattcccttgcatttgatttcatcattatgattgttcatcaaccattcttcacgaaaaatcctcacatcatgtcatataaaggatttattatttttaatggaaaataacattgagagattattttcctttttcataaaatttccctttttccctccctctattctctttactaacattggaaattaaacaagttttacaggctctattgttattaaccctcaaatctattcttcagagaatatatgatcagcctgtgtttactatgcacctactcttataccagaaactgtgaatacaaatacatatatttcctacttctctctttaattggggcacacagtcccatggtccattctgcatttttcaaaattgaatataattgcaacacctgataggttttgccacttagaattctgaaaataaatcaactctgttctaaaccttaagtttccactattattgccaaactctggactgatacaataagccttttaaaaggtgaatttaacacttcacctattatggttatttaagtaaaatgagttttcaaatatttcccccaggagaaatataaaggactatgcaaaaatagaaggagaaaaaggttagttagaggtccagaaggagaattaaaacatggaattgataaattcacctactgatttatgatgttaatgagcaggtacctatacattttatttacttgaaaacattttggccattaactatttctgttttctaaatacatttgtgtttataaaattttaaaatctatatcacaagccttagacatgcctttctttgcaataaagtatatatacctttttacaaatgtaaattttattttgaaacttggcattttctttataattcctaagatatctttgggcacacagactacagataaatctatttaaatcaattcatcattatcactggtttaaatatttaatgtaaccattggaatttttattcttattccttcagagaatcctccttttcttctatgtttctgactgcaatacagcccgatattgttattccctatatcttaatgaaaagcaagctgtcagcaaaatgcatttatagtttccagatgtttaacaatctctttcttcttttcttttttgttattatttttatttatgtgaagttagttagctgaggtaccaaaaaagagacaaagacagtantaaaaagtgtgcataaagcacttatttttgtactttagtacaatgttttatagaactttgtgatctatctaaatatattaagtaaaattacaccattcacttgttgggaaaataatctttggtttggaagatattaacataatgggcatcttagaatcataaatcacatgaaatgagagacaatgcaatatttataattcctggatgatgcaattgttttaattgaattttcaagtgccattataaagttttaaaaattatc

SEQ ID NO: 253 - DNA, 2712 bp, Homo sapien
  misc_feature (84)..(84): n=a,c,g or t
aagctttttttattaaaggaaaaatgggtacagaatactctattgccctccaaatgtccgacatttttaaagccatgttgtccnacaatgtttatacagaaaatagaatgcataggtttaatatagatagcatgtatatgtaggctcatttgtgggagattgcaactttatgtgcccccagttctccttggttttgtaggaaagctaaaagaaaaccttgtactctcactaataatgaaattcatagccatttagaaagggaaaataacctgaaaaccagaatacctcattcatctgaagatgcctggaataaaatatggaattcttctgtacctacctcccccttacagacttttctcctattttgagagagaaattcaagaagaagaatacagcttgttctctttccacaatgatactttgtctaagggaataggagataccaagaaacagtatctttaaaaaagtaagctgcccacaggccttcttggagaatgaagaatatcagccccattcagggtttaccaatgtctctctgaggtgacaatacattctggttttccaggacagtcctggcttaggtctgctgtccttctataaatattaacaatgatccctcttatttccaaacgtgtcccagtttagacaacaaattatacagtgtctgcccccaacacacacacacacaccccaccatctttatgggttgttgttgttttcttgttgtttttaattttgtagaattggctttgtcttctccaaagcagataacagcttaaactaaagagcctagctacttctttctgactgagcagggtcatagtaaacagagaagaatggatcacttcctcctctgaaatctccatcaatccactttctgtccaactatctctctacccagcctatttttggtcctagttttcctctcataacccctgggctgtgagtcctgagttctgccttcatatggcagagcaagctagtcattattatgccaggttaggtggtggggcaagacaaaagatagctcttggggacacttgcttggtctgtagagatccacagggcactagtagggtattagagcatttattggtttctttcttccttgagttgagttacttctatcccaaaacagacaggtcttacgttaaccttcaccttaaaaaggatattgccttttttccttctgcttcacaaatttgctccaacactaattcccttgcatttgatttcatcattatgattgttcatcaaccattcttcacgaaaaatcctcacatcatgtcatataaaggatttattatttttaatggaaaataacattgagagattattttcctttttcataaaatttccctttttccctccctctattctctttactaacattggaaattaaacaagttttacaggctctattgttattaaccctcaaatctattcttcagagaatatatgatcagcctgtgtttactatgcacctactcttataccagaaactgtgaatacaaatacatatatttcctacttctctctttaattggggcacacagtcccatggtccattctgcatttttcaaaattgaatataattgcaacacctgataggttttgccacttagaattctgaaaataaatcaactctgttctaaaccttaagtttccactattattgccaaactctggactgatacaataagccttttaaaaggtgaatttaacacttcacctattatggttatttaagtaaaatgagttttcaaatatttcccccaggagaaatataaaggactatgcaaaaatagaaggagaaaaaggttagttagaggtccagaaggagaattaaaacatggaattgataaattcacctactgatttatgatgttaatgagcaggtacctatacattttatttacttgaaaacattttggccattaactatttctgttttctaaatacatttgtgtttataaaattttaaaatctatatcacaagccttagacatgcctttctttgcaataaagtatatatacctttttacaaatgtaaattttattttgaaacttggcattttctttataattcctaagatatctttgggcacacagactacagataaatctatttaaatcaattcatcattatcactggtttaaatatttaatgtaaccattggaatttttattcttattccttcagagaatcctccttttcttctatgtttctgactgcaatacagcccgatattgttattccctatatcttaatgaaaagcaagctgtcagcaaaatgcatttatagtttccagatgtttaacaatctctttcttcttttcttttttgttattatttttatttatgtgaagttagttagctgaggtaccaaaaaagagacaaagacagtattaaaaagtgtgcataaagcacttatttttgtactttagtacaatgttttatagaactttgtgatctatctaaatatattaagtaaaattacaccattcacttgttgggaaaataatctttggtttggaagatattaacataatgggcatcttagaatcataaatcacatgaaatgagagacaatgcaatattgtataattcctggatgatgcaattgttttaattgaattttcaagtgccattataaagttttaaaaattatcaaaaaaaaaaaaaaaaaaaaagatctttaattaagcggtc

SEQ ID NO: 254 - DNA, 2736 bp, Homo sapien
aagctttttttattaaaggaaaaatgggtacagaatactctattgccctccaaatgtccaacatttttaaagccatgttgtccaacaatgtttatacagaaaatagaatgcataggtttaatatagatagcaatgtatatgtaggctcatttgtgggagattgcaaactttatgtgcccccagttctccttggttttgtaggaaagctaaaagaaaaccttgtactctcactaataatgaaattcatagccaatttagaaagggaaaataacctgaaaaccaaaatacctcattcatctgaagatgcctggaataaaatatggaattcttctgtacctacctcccccttacagacttttctcctattttgagagagaaattcaagaagaagaatacagcttgttctctttccacaaatgatactttgtctaagggaataggagataccaagaaacagtatctttaaaaaagtaagctgcccacaggccttcttggagaatgaagaatatcagccccattcagggtttaccaatgtctctctgaggtgacaatacattctggttttccaggacagtcctggcttaggtctgctgtccttctataaatattaacaatgatccctcttatttccaaacgtgtcccagtttagacaacaaattatacagtgtctgcccccaacacacacacacacaccccaccatctttatgggttgttgttgttttcttgttgtttttaattttgtagaattggctttgtcttctccaaagcagataacagcttaaactaaagagcctagctacttctttctgactgagcagggtcatagtaaacagagaagaatggatcacttcctcctctgaaatctccatcaatccactttctgtccaactatctctctacccagcctatttttggtcctagttttcctctcataacccctgggctgtgagtcctgagttctgccttcatatggcagagcaagctagtcattattatgccaggttaggtggtggggcaagacaaaagatagctcttggggacacttgcttggtctgtagagatccacagggcactagtagggtattagagcatttattggtttctttcttccttgagttgagttacttctatcccaaaacagacaggtcttacgttaaccttcaccttaaaaaggatattgccttttttccttctgcttcacaaatttgctccaacactaattcccttgcatttgatttcatcattatgattgttcatcaaccattcttcacgaaaaatcctcacatcatgtcatataaaggttttattatttttaatggaaaataacattgagagattattttcctttttcataaaatttccctttttccctccctctattctctttactaacattggaaattaaacaagttttacaggctctattgttattaaccctcaaatctattcttcagagaatatatgatcagcctgtgtttactatgcacctactcttataccagaaactgtgaatacaaatacatatatttcctacttctctctttaattggggcacacagtcccatggtccattctgcatttttcaaaattgaatataattgcaacacctgataggttttgccacttagaattctgaaaataaatcaactctgttctaaaccttaagtttccactattattgccaaactctggactgatacaataagccttttaaaaggtgaatttaacacttcacctattatggttatttaagtaaaatgagttttcaaatatttcccccaggagaaatataaaggactatgcaaaaatagaaggagaaaaaggttagttagaggtccagaaggagaattaaaacatggaattgataaattcacctactgatttatgatgttaatgagcaggtacctatacattttatttacttgaaaacattttggccattaactatttctgttttctaaatacatttgtgtttataaaattttaaaatctatatcacaagccttagacatgcctttctttgcaataaagtatatatacctttttacaaatgtaaattttattttgaaacttggcattttctttataattcctaagatatctttgggcacacagactacagataaatctatttaaatcaattcatcattatcactggtttaaatatttaatgtaaccattggaatttttattcttattccttcagagaattctccttttcttctatgtttctgactgcaatacagcccgatattgttattccctatatcttaatgaaaagcaagctgtcagcaaaatgcatttatagtttccagatgtttaacaatctctttcttcttttcttttttgttattatttttatttatgtgaagttagttagctgaggtaccaaaaaagagacaaagacagtattaaaaagtgtgcataaagcacttatttttgtactttagtacaatgttttatagaactttgtgatctatctaaatatattaagtaaaattacaccattcacttgttgggaaaataatctttggtttggaagatattaacataatgggcatcttagaatcataaatcacatgaaatgagagacaatgcaatattgtataattcctggatgatgcaattgttttaattgaattttcaagtgccattataaagttttaaaaattatcaatatgagttggtgcctaattttttctttcctaaaaataaaattttttctttttgtgagt

SEQ ID NO: 255 - DNA, 579 bp, Homo sapien
attattattactatattttgcattcacagatagtctttctgttgtccatattggaactaattgcttaaattcatgaaagaaagcattgtaagacattacagcaagaaaaattttctcacatgtctgagttggaaaagtacaaaaggacatctatcttgtttagatatggactaccaatatgtatgtatacagcatacagcatataaagttagagggaataataggcagtatatcttgtgtacacataactatagtcctccataattgttccttaaatcatgtggttccagtgtcacaaaacattcaattttgaaataaaattctttcattgggatatggaactagaattatagtatcagtagtatttgggttttaaaaacattttggtggtatttttcttgctaaaattattttctgctgtaagtggtatagttgatgtttgtttctagccctatgaagatatatttgttgtcatatcaagtctatatgtaataaaggaaaatataaattatttattgtcatattttaaagaatatttatattttttataaatatataaaaatgtcatgcatactggtt

SEQ ID NO: 256 - DNA, 596 bp, Homo sapien
ataaaagaggccttattattattattactatattttgcattcacagatagtctttctgttgtccatattggaactaattgcttaaattcatgaaagaaagcattgtaagacattacagcaagaaaaattttctcacatgtctgagttggaaaagtacaaaaggacatctatcttgtttagatatggactaccaatatgtatgtatacagcatacagcatataaagttagagggaataataggcagtatatcttgtgtacacataactatagtcctccataattgttccttaaatcatgtggttccagtgtcacaaaacattcaattttgaaataaaattctttcattgggatatggaactagaattatagtatcagtagtatttgggttttaaaaacattttggtggtatttttcttgctaaaattattttctgctgtaagtggtatagttgatgtttgtttctagccctatgaagatatatttgttgtcatatcaagtctatatgtaataaaggaaaatataaattatttattgtcatattttaaagaatatttatattttttataaatatataaaaatgtcatgcatactggtt

SEQ ID NO: 257 - DNA, 241 bp, Homo sapien
gtggggagtgccgactggtgcccaccccctcggcacaggtctgagctgctcccacattgattactttgatgctgtttggaaccatcaaatatcaaatcatttccaagaagcccatggtgtcctggctttgctggtgcccttccctcacctttgtcagttcctgggggtccaggctggccgggtgctcaagcagcctccaagatggctcctgtggtcccctttcccaccacactggtttgca

SEQ ID NO: 258 - DNA, 241 bp, Homo sapien; identical to SEQ ID NO: 257

SEQ ID NO: 259 - DNA, 711 bp, Homo sapien
tgagcctcaggacagaataaagagagccagcgatagcacttaggattcttacttaagcaacttggtggaaatcacactgagaaaggaaacaaacaagagaacaaattataagcactaaagataatgagttaacttttgaatatgttgtcgtggtacatatccacaactcatatccaagtagatataaatatccaataggcaggtggatactgaagtgagatctgagctaaaagtagacatttgggagtcatcagcattgaaaccatgggagtgggtgaattcttatagcggagtatatacaatgagcagagagaagggtggaggatagatgcattcacatgtaaaatacagatgagggaatagaagctggtgagactagaaggcaggaagaaacccagaagagtatgactgtgaacactaagggaaaaggtgtttgttttcaagaaggaaggagttgaacaagtgtcagtggtacctagaggtcatgtataaggtactgagaagtggaaagtagctattgtgcaatatttaacgaaaagacatccttaatggtcttaatgaaagtagtttcagttaagttatgacaaataaaagccaatgattcaaggaataaatagcaggtgagtaaatagagaaatgaagatgagactgtttttctaagaaggttagtatggggagaggatggaaaatggaagagatagccagtaattg

SEQ ID NO: 260 - DNA, 1406 bp, Homo sapien
cctccaactcctgggctcaagccaaccttccacttcagccaatcaagtagctaggactcccggcatgtgccaccatgcccagataatttttggagtttttttgagacagggtctcactcttgtcacccaggctggagtgcagtggcatgatcttagctccctgcaacccatgcctcccaagctcaaaaaatcctcccatctcagcctcctgagtagctgaaactacagacacatgtcaccatgcctggctaatttttttttttcttttttactggtagagacggggtttcaccatgttgcccaggctggtcttaaactcctgggctcaagtgatccacctgtctcagcctcccaaagtgctgggattacaggtgtgagccatcacacccagccttttcaaatattttgtagagatggggtctcacttcgttgcccaggctgctctcaaactcctgacttcaggtgatcctcctacctccgcctcccaaagtgttgggattacaggtgtgagccaccatgctcagtccaattactggctatctcttccattttccatcctctccccatactaaccttcttagaaaaacagtctcatcttcatttctctatttactcacctgctatttattccttgaatcattggcttttatttgtcataacttaactgaaactactttcattaagaccattaaggatgtcttttcgttaaatattgcacaatagctactttccacttctcagtaccttatacatgacctctaggtaccactgacacttgttcaactccttccttcttgaaaacaaacaccttttcccttagtgttcacagtcatactcttctgggtttcttcctgccttctagtctcaccagcttctattccctcatctgtattttacatgtgaatgcatctatcctccacccttctctctgctcattgtatatactccgctataagaattcacccactcccatggtttcaatgctgatgactcccaaatgtctacttttagctcagatctcacttcagtatccacctgcctattggatatttatatctacttggatatgagttgtggatatgtaccacgacaacatattcaaaagttaactcattatctttagtgcttataatttgttctcttgtttgtttcctttctcagtgtgatttccaccaagttgcttaagtaagaatcctaagtgctatcgctggctctctttattctgtcctgaggctcacatgtaatcactaaaatctgttaatttatgtcttgaatgtctccggaattcatccataatttcttcagcctattacactctggtctcttctcacctagatgactgcaacagctcctgtgggtctgtcaccaataccgaatcttaaccctttcaatccattcccacacag

SEQ ID NO: 261 - DNA, 1163 bp, Homo sapien
taggaaggtcattctggttgctgtgtgggaatggattgaaagggttaagattcggtattggtgacagaccattacaggagctgttgcagtcatctaggtgagaagagaccagagttattgtaataggctgaagaaattatggatgaattccagagacattcaagacataaaattaacagattttagtgattacatgtgagcctcagggcagataaagagagccagcgatagcacttaggattcttacttaagcaacttggtggaaatcacactgagaaaggaaacaaacaagagaacaaattataagcactaaagataatgagttaacttttgaatatgttgttcgtggtacatatccacaactcatatccaagtagatataaatatccaataggcaggtggatactgaagtgagatctgagctaaaagtagacatttgggagtcatcagcattgaaaccatgggagtgggtgaattcttatagcggagtatatacaatgagcagagagaagggtggaggatagatgcattcacatgtaaaatacagatgagggaatagaagctggtgagactagaaggcaggaagaaacccagaagagtatgactgtgaacactaagggaaaaggtgtttgttttcaagaaggaaggagttgaacaagtgtcagtggtacctagaggtcatgtataaggtactgagaagtggaaagtagctattgtgcaatatttaacgaaaagacatccttaatggtcttaatgaaagtagtttcagttaagttatgacaaataaaagccaatgattcaaggaataaatagcaggtgagtaaatagagaaatgaagatgagactgtttttctaagaaggttagtatggggagaggatggaaaatggaagagatagccagtaattggactgagcatggtggctcacacctgtaatcccaacactttgggaggcggaggtaggaggatcacctgaagtcaggagtttgagagcagcctgggcaacgaagtgagaccccatctctaccaaatatttgaaaaggctgggtgtgatggctcacacctgtaatcccagcactttgggaggctgagacaggtggatcacttgagcccaggagtttaagaccagcctgggcaacatggtgaaaccccgtctctaccagt

SEQ ID NO: 262 - DNA, 587 bp, Homo sapien
agcaggtagaaatggggtggaagaggacggggtgaaaaataaggcttctcagtatatgtctttttatgttgtattcatttttgaactatctggatatttcatctataaaactttggccttgcgtgccactgcaagggagtagcagtgaaatgactctgatttcttgttgctccatgtatcaaattcactccttagtctactgtttagatgtttctaccttgtgccttggcatgatctgtttaactgaaatgaactatatctatgtccctaaatcactttcaaacttcaactcaaaatatatcacttcctcctcaattggctatttatttcattctgccttttagcataatgtatttatgttgtatatttgtatattggttctacgttggtattactataaatcctaatatagttcatgaatggtttccactcccactttgattgtttacacccttaattataaaaattgtttttataatttcatgaatggtttctactcccacttgattattaacaccctcaatagtatctgaattatctgaagcataacttaagagttatttgataatttttatttgcttttgagg

SEQ ID NO: 263 - DNA, 1413 bp, Homo sapien
agacgttgaatgagtagaattcactgagtagatggtaaggaggaatatattctgcaaaagctgagagaataacttgagcctaagactagagaattaaaagcaaacacagtatttaatgacaagttaaagtttaatgaaataactatttgatgtgactagcggaaactgaatttagtgaatagtgataaaacagaaaaggttagctggatcagagggcctgaaagttagtttaacagcttattttagcacctttccccttccattcctgacttcactctgcagataacagcttttcccaagctaatattcacattaacagttcctagtatcatcattgtcattccccaaagttttctttttcttctttcactactttgtatcccatatcctttctcatgtaaattattaaatacccgtcttgtcctttccattcccacagccactactgtggcctttttcctagaatctcatatttcttttgctcatttttagtattattggtaggactttctcatttctaggactttactgtgtatcaattttagtattcaaactagctttatagagtagctaaaatagttcctatatcagagagtctgaagaatatgaagggctggagaacttcatagataagagctcactgatagggaatcctctacatgctgatgtagaatatattgttcagtgaaaggaaagggcagaaaagtacagtatcatacttcttgtgtcagaaaggaggcggatattagaatacagactctgctgatatttgcacaaagaaactctaaaaaaaactagaagaaataataaaagaaaatacctatagaagcaggtagaaatggggtggaagaggacggggtgaaaaataaggcttctcagtatatgtctttttatgttgtattcatttttgaactatctggatatttcatctataaaactttggccttgcgtgccactgcaagggagtagcagtgaaatgactctgatttcttgttgctccatgtatcaaattcactccttagtctactgtttagatgtttctaccttgtgccttggcatgatctgtttaactgaaatgaactatatctatgtccctaaatcactttcaaacttcaactcaaaatatatcacttcctcctcaattggctatttatttcattctgccttttagcataatgtatttatgttgtatatttgtatattggttctacgttggtattactataaatcctaatatagttcatgaatggtttccactcccactttgattgtttacacccttaattataaaaattgtttttataatttcatgaatggtttctactcccacttgattattaacaccctcaatagtatctgaattatctgaagcataacttaagagttatttgataattttatttgcttttgagg

SEQ ID NO: 264 - DNA, 1533 bp, Homo sapien
agacgttgaatgagtagaattcactgagtagatggtaaggaggaatatattctgcaaaagctgagagaataacttgagcctaagactagagaattaaaagcaaacacagtatttaatgacaagttaaagtttaatgaaataactatttgatgtgactagcggaaactgaatttagtgaatagtgataaaacagaaaaggttagctggatcagagggcctgaaagttagtttaacagcttattttagcacctttccccttccattcctgacttcactctgcagataacagcttttcccaagctaatattcacattaacagttcctagtatcatcattgtcattccccaaagttttctttttcttctttcactactttgtatcccatatcctttctcatgtaaattattaaatacccgtcttgtcctttccattcccacagccactactgtggcctttttcctagaatctcatatttcttttgctcatttttagtattattggtaggactttctcatttctaggactttactgtgtatcaattttagtattcaaactagctttatagagtagctaaaatagttcctatatcagagagtctgaagaatatgaagggctggagaattcatagataagagctcactgatagggaatcctctacatgctgatgtagaatatattgttcagtgaaaggaaagggcagaaaagtacagtatcatacttcttgtgtcagaaaggaggcggatattagaatacagactctgctgatatttgcacaaagaaactctaaaaaaaactagaagaaataataaaagaaaatacctatagaagcaggtagaaatggggtggaagaggacggggtgaaaaataaggcttctcagtatatgtctttttatgttgtattcatttttgaactatctggatatttcatctataaaactttggccttgcgtgccactgcaagggagtagcagtgaaatgactctgatttcttgttgctccatgtatcaaattcactccttagtctactgtttagatgtttctaccttgtgccttggcatgatctgtttaactgaaatgaactatatctatgtccctaaatcactttcaaacttcaactcaaaatatatcacttcctcctcaattggctatttatttcattctgccttttagcataatgtatttatgttgtatatttgtatattggttctacgttggtattactataaatcctaatatagttcatgaatggtttccactcccactttgattgtttacacccttaattataaaaattgtttttataatttcatgaatggtttctactcccacttgattattaacaccctcaatagtatctgaattatctgaagcataacttaagagttatttgataatttttatttgcttttgaggatcttaatatgttaactttatttggataattttaatcaacaaaattttcaattaggaaaggtctcacacagcaaagttttactacgtttccgttatcttaaacttcaagatattaaatag

SEQ ID NO: 265 - DNA, 1693 bp, Homo sapien
aaggtagctcccttactgtgggacataaaagttgcttgttttcagctttgaccagtgatgaactgataaccctggtaggaaaatgaaacattggggctgggcttgtaatacgctttcttaaaagaatgccccattgaaattagagtggcacggtgccaccagaccaagggttctcatcccgatgccacagagggaccacaggtgttatgaagtggtttgcaaaattgaatgtatgccaaaataaaataataaaaataaaaataaaaccccacaacaaaagcagatatggtctttagtgctcattagatctcaaagggtcattactcctcaaagattaagaaactgcttctttatgaggaggttgtcagaggagctgaatagtatcaataagaggaagatgtttgagattcaaaaggaagtaatattcgactaaggcatagcttctttccatcttaaaaaaaagccacccatgaaaataaatatagtttaaatttcctatttaagatgtcttattttaaaaatgatttgcatactctgtgtgtttgagttggctatgaaggagaaatcctagcatttccactcttgtaactagggaaaagcattttgaatttttagcagtagtatattatgtgatgatgactcagctgacttcccgtttcaaatggaatgttcaaaacagattgaaacctggttgaagaattttatactttgaaccttacaagatattttctgcaaacagtgactgattggattttgtataataacaaacaagattaagccaactcagttgttttgctgttcttattagtggttttcagtcagggagcacttattgagcagtttgctgcaataatattgaatatttttagagttatgacgtctgtgttttgttgactttggtcccttctttctcccattcttttgaagtttccctaaaacatgtgtgcacagacgggagagaatggtagttaagtgtgtgctgattttaaatgtccttttaaatatcatttattccttgataattgactgtataactgatgtaagagaaatatgttttatatgttattccacttgtgaatctctttgcaatgtgaggcatatagtgaaaatcttacaaagatagggtcataaaatgtgcattctctacactgctgcaggttaatcgtcctcgagccacgtttctgaggcctgtcagtcactatttcttagaaacctttgttggctccttcccagtgactctggaattaaagcccagactcttgttttttgctcagcttatcaatttagcactgtcccttccaccttttgccctgtccctaactcttccttctctgaatgtacctttcagtttctctcaacttttaaataacagctttattcagataaacttcccactatgataaaattcaccctcatcacaagtccacaacagtgtatgcattgacctggtcttcaagtatatccacagaagttgtgcaatccgcaaccactgtctaatcctagaattttcaccccttcacccaaaaaccccgataatagcacgccactccccaatttgtcccttccacccagcctactggctaacagtaatctactttctataataactctatggacttacctatttcgctttacagtggaatcatactatatgatacttatgtacgtgactatgtctaattaagatatagtg

SEQ ID NO: 266 - DNA, 1715 bp, Homo sapien
cagaagattcggcacgagaacaggtagctcccttactgtgggacataaaagttgcttgttttcagctttgaccagtgatgaactgataaccctggtaggaaaatgaaacattggggctgggcttgtaatacgctttcttaaaagaatgccccattgaaattagagtggcacggtgccaccagaccaagggttctcatcccgatgccacagagggaccacaggtgttatgaagtggtttgcaaaattgaatgtatgccaaaataaaataataaaaataaaaataaaaccccacaacaaaagcagatatggtctttagtgctcattagatctcaaagggtcattactcctcaaagattaagaaactgcttctttatgaggagtttgtcagaggagctgaatagtatcaataagaggaagatgtttgagattcaaaaggaagtaatattcgactaaggcatagcttctttccatcttaaaaaaaagccacccatgaaaataaatatagtttaaatttcctatttaagatgtcttattttaaaaatgatttgcatactctgtgtgtttgagttggctatgaaggagaaatcctagcatttccactcttgtaactagggaaaagcattttgaatttttagcagtagtatattatgtgatgatgactcagctgacttcccgtttcaaatggaatgttcaaaacagattgaaacctggttgaagaattttatactttgaaccttacaagatattttctgcaaacagtgactgattggattttgtataataacaaacaagattaagccaactcagttgttttgctgttcttattagtggttttcagtcagggagcacttattgagcagtttgctgcaataatattgaatatttttagagttatgacgtctgtgttttgttgactttggtcccttctttctcccattcttttgaagtttccctaaaacatgtgtgcacagacgggagagaatggtagttaagtatgtgctgattttaaatgtccttttaaatatcatttattccttgataattgactgtataactgatgtaagagaaatatgttttatatgttattccacttgtgaatctctttgcaatgtgaggcatatagtgaaaatcttacaaagatagggtcataaaatgtgcattctctacactgctgcaggttaatcgtcctcgagccacgtttctgaggcctgtcagtcactatttcttagaaacctttgttggctccttcccagtgactctggaattaaagcccagactcttgtttttttgctcagcttatcaatttagcactgtcccttccaccttttgccctgtccctaactcttccttctctgaatgtacctttcagtttctctcaacttttaaataacagtctttattcagataaacttcccactatgataaaattcaccctcatcacaagtccacaacagtgtatgcattgacctggtcttcaagtatatccacagaagttgtgcaatccgcaaccactgtctaatcctagaattttcaccccttcacccaaaaaccccgataatagcacgccactccccaatttgtcccttccacccagcctactggctaacagtaatctactttctataataactctatggacttacctatttcgctttacagtggaatcatactatatgatacttatgtacgtgactatgtctaattaagatatagtg

SEQ ID NO: 267 - DNA, 1747 bp, Homo sapien
aaggtagctcccttactgtgggacataaaagttgcttgttttcagctttgaccagtgatgaactgataaccctggtaggaaaatgaaacattggggctgggcttgtaatacgctttcttaaaagaatgccccattgaaattagagtggcacggtgccaccagaccaagggttctcatcccgatgccacagagggaccacaggtgttatgaagtggtttgcaaaattgaatgtatgccaaaataaaataataaaaataaaaataaaaccccacaacaaaagcagatatggtctttagtgctcattagatctcaaagggtcattactcctcaaagattaagaaactgcttctttatgaggaggttgtcagaggagctgaatagtatcaataagaggaagatgtttgagattcaaaaggaagtaatattcgactaaggcatagcttctttccatcttaaaaaaaagccacccatgaaaataaatatagtttaaatttcctatttaagatgtcttattttaaaaatgatttgcatactctgtgtgtttgagttggctatgaaggagaaatcctagcatttccactcttgtaactagggaaaagcattttgaatttttagcagtagtatattatgtgatgatgactcagctgacttcccgtttcaaatggaatgttcaaaacagattgaaacctggttgaagaattttatactttgaaccttacaagatattttctgcaaacagtgactgattggattttgtataataacaaacaagattaagccaactcagttgttttgctgttcttattagtggttttcagtcagggagcacttattgagcagtttgctgcaataatattgaatatttttagagttatgacgtctgtgttttgttgactttggtcccttctttctcccattcttttgaagtttccctaaaacatgtgtgcacagacgggagagaatggtagttaagtatgtgctgattttaaatgtccttttaaatatcatttattccttgataattgactgtataactgatgtaagagaaatatgttttatatgttattccacttgtgaatctctttgcaatgtgaggcatatagtgaaaatcttacaaagatagggtcataaaatgtgcattctctacactgctgcaggttaatcgtcctcgagccacgtttctgaggcctgtcagtcactatttcttagaaacctttgttggctccttcccagtgactctggaattaaagcccagactcttgttttttgctcagcttatcaatttagcactgtcccttccaccttttgccctgtccctaactcttccttctctgaatgtacctttcagtttctctcaacttttaaataacagctttattcagataaaattcccatatgataaaattcacccttttaaagtccacaaagtgtatgatttaatggtttttagtatattcacagagttgtgcaatcagcaccactgtctaattctagaattttcaccccttcacccaaaaaccccataatagcagccactccccatttgtcccttccacccagcctctggcaaccactaatctactttctattataactctatggacttacctattttcgtttaagtggaatcatactatatgatacttttgtacgtgacttgtcttatttagtgtagtgttttcaaggttcgtccatcatgtcgcatatatcctttattcctttttatgggcaaataaatttcattgta

SEQ ID NO: 268 - DNA, 665 bp, Homo sapien
gggctggaggccagaagcatagtatcgcccttcctcccagcctcagtcagagggacctcctgaggcctcctctccaagtccccttccccacaagcctagccatggacctggcttgaacaaggccatggcagatacagtcagttttgccccctccacatctcccatctccctcttcttctatgagtgcctcccttctcccactccctatgcacctgtggggttccaccactttgccctctttgtgcagaaaggggtgccaggcctggtcaagcagggccctccctccttctgcctatagcgattgggtcagggatgagcacatggctggcagaactgggtaaaagaagattttattccactggcctgaaagctagcagggcatgagcctggaactgctgccagctatattattatctcataaggagatcctatttgagggctaagccagcacagagcaagcacagttgagggacaaagatagagtgctatcttagtgatcttagtgatcagcccgtggatcaagccatgcctgaagcctaacccagcctttccagaaacatgagtccataaagttttttttgttttttgcttaagcccatttcagttggactttctgtcccttgcaccagcttttgccttgctcctctgccacagacacagggccc

SEQ ID NO: 269 - DNA, 385 bp, Homo sapien
ccctccttctgcctatagcgattgggtcagggatgagcacatggctggcagaactgggtaaaagaagattttattccactggcctgaaagctagcagggcatgagcctggaactgctgccagctatattattatctcataaggagatcctatttgagggctaagccagcacagagcaagcacagttgagggacaaagatagagtgctatcttagtgatcttagtgatcagcccgtggatcaagccatgcctgaagcctaacccagcctttccagaaacatgagtccataaagttttttttgttttttgcttaagcccatttcagttggactttctgtcccttgcaccagcttttgccttgctcctctgccacagacacagggccc

SEQ ID NO: 270 - DNA, 733 bp, Homo sapien
  misc_feature (502)..(520): n=a,c,g or t
tttatcaccatgtcgtggctttaacaaccaatgccctattttccactggaaataaagtcaatagtgcctttaaactaaaaaagatgagaaatccaatttgagaaaacacagaattgatttagaaaactcattcttaagattctcttcctctagaaccacttctggaacaaaatatcttttggtcagcgttgaaacggagtaacaaaatcaatatgacatatacaaatgatttattgcaaggaactttcttatgccactgtgggactggctaagcaactgcaaaaaacatatggctataccccaggatggctcagatggaacactaacccacgagaggaagatgctactaaaaggtgcaatttcttttttcaaagaagcttcagctctacttttaaataatttcaagtgattcatcaggcccactgacattatctcacataatatccctactcaaagccaactgattatgggctaaatatctacaaaatgccttccatatagnnnnnnnnnnnnnnnnnnntactgtttgattaaataactagggactgtagtctaggcatgttgtaattaaaattgataccacacagatcctcatcatcagaaaactgtttaaggaaaaattaatattcagtacaccaggatacagcaggcattagaaatgaggttggaggtcaacttatttatacagcctttaacattagtgtcatattaggacaatcctgttaggagcaag

SEQ ID NO: 271 - DNA, 475 bp, Homo sapien
tttatcaccatgtcgtggctttaacaaccaatgccctattttccactggaaataaagtcaatagtgcctttaaactaaaaaagatgagaaatccaatttgagaaaacacagaattgatttagaaaactcattcttaagattctcttcctctagaaccacttctggaacaaaatatcttttggtcagcgttgaaacggagtaacaaaatcaatatgacatatacaaatgatttattgcaaggaactttcttatgccactgtgggactggctaagcaactgcaaaaaacatatggctataccccaggatggctcagatggaacactaacccacgagaggaagatgctactaaaaggtgcaatttcttttttcaaagaagcttcagctctacttttaaataatttcaagtgattcatcaggcccactgacattatctcacataatatccctactcaaagccaactgattatgggctaa

SEQ ID NO: 272 - DNA, 403 bp, Homo sapien
ctttgtttcttgtgaccatgtatttttgcatattaagttccgaatgtatgaatgcatttattcaactagtctactccactttcacatcttaaaataactcttgttgttttatttcactataaaagttgcaaatgttcattgaatataatgtgcaaatgtggaaaaatataaaggaaattcatcaaaatgtatcttaattttataagtgatcttttccttctgtttttccaggcttttagtcaaatttttaaatgagttttcctcttatcatgaaacattctttaaaactattttggtatgtaattattttgttgtacagtttatatactgttgaaaataaattttcctctgggatcttagtttcttccagtttttcaccatgataaaaataatattagtagag

SEQ ID NO: 273 - DNA, 403 bp, Homo sapien
ctttgtttcttgtgaccatgtatttttgcatattaagttccgaatgtatgaatgcatttattcaactagtctactccactttcacatcttaaaataactcttgttgttttatttcactataaaagttgcaaatgttcattgaatataatgtgcaaatgtggaaaaatataaaggaaattcatcaaaatgtatcttaattttataagtgatcttttccttctgtttttccaggcttttagtcaaatttttaaatgagttttcctcttatcatgaaacattctttaaaactatttttgtatgtaattattttgttgtacagtttatatactgttgaaaataaattttcctctgggatcttagtttcttccagtttttcaccatgataaaaataatattagtagag

SEQ ID NO: 274 - DNA, 478 bp, Homo sapien
gtgatagaaactttcagctgaggagtctatatgccatactactctatgtggcatctttaggtctctgtgaaatcatgttgatgtaattgattaacaaaaataatttagaaaatacgtcaggcacagttgatggcttctcaatatctgctttgcatttttaaacaaatcaagaatgtaattttaacttttgcttatggtcattcttatgactacacggaaagggatggaatcatacttacttgtcttatacatggactgtttttagttaacaataacataactacacaaaggaaaggaaatgtttacattttaaaaaattactgtcaattacatctggtatttttcagattatgcataaaataatatgagtttgactattgtatcagaatattttaatcaaatcctgcaatttatattaacttaaaaaaacatctggtaaagactgggtgtggcagctcacgcctgtaatcccagcact

SEQ ID NO: 275 - DNA, 1109 bp, Homo sapien
taatacgaccacatagggatttggccctcagcgagaattcggcagagtggggttttgccacgttggccaggctggtctcaaactcctgaactcaagtaatttgcctgcttcggcctcccagagtcctgggattacagtcgtgagccatcgcgcctggccgtgatagaaactttcagctgaggagtctatatgccatactactctatgtggcatctttaggtctctgtgaaatcatgttgatgtaattgattaacaaaaataatttagaaaatacgtcaggcacagttgatggcttctcaatatctgctttgcatttttaaacaaatcaagaatgtaattttaacttttgcttatggtcattcttatgactacacggaaagggatggaatcatacttacttgtcttatacatggactgtttttagttaacaataacataactacacaaaggaaaggaaatgtttacattttaaaaaattactgtcaattacatctggtatttttcagattatgcataaaataatatgagtttgactattgtatcagaatattttaatcaaatcctgcaatttatattaacttaaaaaaacatctggtaaagactgggtgtggcagctcacgcctgtaatcccagcactttgggaggccgaggctggatggatgattgcttgagcgcaggagttctagaccagcctgggcaatacagggagaccctgtctctatttcaaaaataaataaataggccccggtgtgtgatgttccccttcctgtgtccatgtgttctcaaaaaaaaaaaaaaaataaaaataaaaataaataaataaataaccggtaaagatgtactgtttctactgcagtttataatatttcatttattaagaaagatatcatctcagctttcaaattcaacatagccctcaatttatgacataagttttatacttagtattttataatttcttaattttgttataaacttgaaaatgtagaatatggggtccaaaatctgttgaacatttgttcagctagttaggtttcaacattaatcatatacattaatagtatcttcatgtacgctatgtgaagggtgttttttataagaaataggaa

SEQ ID NO: 276 - DNA, 1174 bp, Homo sapien
tggggttttgccacgttggccaagctggtctcaaactcctgaactcaagtaatttgcctgcttcggcctcccagagtcctgggattacagtcgtgagccatcgcgcctggccgtgatagaaactttcagctgaggagtctatatgccatactactctatgtggcatctttaggtctctgtgaaatcatgttgatgtaattgattaacaaaaataatttagaaaatacgtcaggcacagttgatggcttctcaatatctgctttgcatttttaaacaaatcaagaatgtaattttaacttttgcttatggtcattcttatgactacacggaaagggatggaatcatacttacttgtcttatacatggactgtttttagttaacaataacataactacacaaaggaaaggaaatgtttacattttaaaaaattactgtcaattacatctggtatttttcagattatgcataaaataatatgagtttgactattgtatcagaatattttaatcaaatcctgcaatttatattaacttaaaaaaacatctggtaaagactgggtgtggcagctcacacctgtaatcccagcactttgggaggccgaggctggatggatgattgcttgagcgcaggagttctagaccagcctgggcaatacagggagaccctgtctctatttcaaaaataaataaataggccccggtgtgtgatgttccccttcctgtgtccatgtgttctcaaaaaaaattaaaaaataaaaataaaaataaataaataaataaccagtaaagatgtactgtttctactgcagtttataatatttcatttattaagaaagatatcatctcagctttcaaattcaacatagccctcaatttatgacataagttttatacttagtattttataatttcttaattttgttataaacttgaaaatgtagaatatggggtccaaaatctgttgaacatttgttcagctagttaggtttcaacattaatcatatacattaatagtatctttatgtaaggatatgtgaagggtgtttttctttataagaaaattagtttaatcaggtgagctgatacttaggattatacatatatctatgataaaattgaaagtaattgtggttgttctttagagaacgtgttttgattttgacttagtattggg

SEQ ID NO: 277 - DNA, 525 bp, Homo sapien
tttcattgttactagaatgtcatctttcgccgacaagttgttccccagcagaatcctgctgctcctggcacaaaacaagcagatgaagaggtaaatgaccttgtgcaaatctcttctcggcgctgagcctgccgccgcctaagcgcgctgttattctagcttatccgcaaggactctgctaaattaggcaggatgacatgtggttgttctccgttaaagcagatgggtacaatgaggctcagagagatgagatgatttggcaggttaatgagagcactaggctggcactcggatcggcctgctcccagtggagggctttctgccacccatgagccagccatgtaaaatgagcagggtggggttggatgagtgaatcccttaaggagcttgtaaggatgcagatcacccggccctggagatcctgagtctgggaaacagtggattggtggattcctaaggacctttagaggctcaagattatccactgtgcccagcctcagatctcacagggccgggtatctcttt

SEQ ID NO: 278 - DNA, 402 bp, Homo sapien
gcggccgctgggagcggggttcgatcccgtgatgccgtcgtgggtgccggccagagaagagctccggaggccggggcggccggcgggcgtgcgaatgtcatctttcccaacaagttgttcccagcagaatcctctctcctggcacaaaacaagcagatgaagagcagccctgagaggtagacacagcggagatttttttcacccgcattgtacagaagagaaaatgaagctttgcccaacctgcaggagatcccctcaccttgcaaaagagccaagctgtggctaaactgggatcttcagtccctggaccatttagcttgactaagagaacaggaatggaggccaaaagatctacaaaatgctcacacagagaagatgacagcttctacaaataaatgtcaa

SEQ ID NO: 279 - DNA, 583 bp, Homo sapien
gcggccgctgggagcggggttcgatcccgtgatgccgtcgtgggtgccggccagagaagagctccggaggccggggcggccggcgggcgtgcgaatgtcatctttcccaacaagttgttcccagcagaatcctctctcctggcacaaaacaagcagatgaagaggtaaatgaccttgtgcaaatctcttctcccgctgagcctgccccccaacccctgttattctagctatcccaaggactctgcaaattaggcaggatgacagtggttgttcccgttaaacagatgggaacaatgaggctcagagagatgagatgatttggcaggttaatgagagcctaggctggcactcggatcggcctgctcccagtggagggctttctgccacccatgagccagcctgtaaaatgagcagggtggggttggatgagtgaatcccttaaggagcttgtaaggatgcagatcacccggccctggagatcctgagtctgggaaacagtggattggtggattcctaaggacctttagaggctcaagattatccactgtgcccagcctcagatctccaggccgggtatctcttt

SEQ ID NO: 280 - DNA, 781 bp, Homo sapien
ggggttaggggcctgaagatctggtgtctgatgtttgcagagcccaaccctggaagaatgccaggcacctggcgaggaagccatggtctcttccttccttgacttagaacaactaggaggctcctaggttcagtcttactgggaaggggatgggaatgtgggccaaaggacagggcagaggctgatctaaatacgtgggccagctccactgaggaaactgagatggaccagtgtggcgtggaagaaaccaaggggagcagccaaatgtcctcttctccaggctgcctggcacagagctgggcacacaaccaaccctgcagaccagctgtccaatgggcaagggaaggagcaaggcaggtccatctgcagtctcggctgctgggaaggtgagacagtgcagggcattggaggctgactccacagtggacagagaagactttcagggagatcagctcagctcagtctgaggggcagggacaggaggagatagcgtttctgcggttatcaggaagggaagtggaggaggcagccaggaagatatcgggaagaaagaggaagggcgtgtgctagatcccgaagaggaaaaagcagctgaatttagcagcctcaggggtgtgaaggtcaaaagtatcaaggaatcttaagcccagggttctgggccaagaaagcagcactctctctcatttacatgggcatctgagatgaaacctggtgtccggggacttctaccaacctaggattcgtgggggagggcagtgggactggttcagaacgtggctca

SEQ ID NO: 281 - DNA, 1253 bp, Homo sapien
  misc_feature (755)..(870): n=a,c,g or t
ggggttaggggcctgaagatctggtgtctgatgtttgcagagcccaaccctggaagaatgccaggcacctggcgaggaagccatggtctcttccttccttgacttagaacaactaggaggctcctaggttcagtcttactgggaaggggatgggaatgtgggccaaaggacagggcagaggctgatctaaatacgtgggccagctccactgaggaaactgagatggaccagtgtggcgtggaagaaaccaaggggagcagccaaatgtcctcttctccaggctgcctggcacagagctgggcacacaaccaaccctgcagaccagctgtccaatgggcaagggaaggagcaaggcaggtccatctgcagtctcggctgctgggaaggtgagacagtgcagggcattggaggctgactccacagtggacagagaagactttcagggagatcagctcagctcagtctgaggggcagggacaggaggagatagcgtttctgcggttatcaggaagggaagtggaggaggcagccaggaagatatcgggaagaaagaggaagggcgtgtgctagatcccgaagaggaaaaagcagctgaatttagcagcctcaggggtgtgaaggtcaaaagtatcaaggaatcttaagcccagggttctgggccaagaaagcagcactctctctcatttacatgggcatctgagatgaaacctggtgtccggggacttctaccaacctaggattcgtgggggagggcnnnnnnnnnnnnnnnnnnnnnnnnnnnnnnnnnnnnnnnnnnnnnnnnnnnnnnnnnnnnnnnnnnnnnnnnnnnnnnnnnnnnnnnnnnnnnnnnnnnnnnnnnnnnnnnnnnnntatagggttgctctaaagattagacaaggccaagtgttcagaacaatactggcatatacaaagagctccaaaattttatttttcagttactttgctccaatcgggtaactcccaggagagtgtcacagagcaggacagcaaggacagcacctacagcctcagcagcaccctgacgctgagcaaagcagactacgagaaacacaaagtctacgcctgcgaagtcacccatcagggcctgagctcgcccgtcacaaagagcttcaacaggggagagtgttagagggagaagtgcccccacctgctcctcagttccagcctgaccccctcccatcctttggcctctgaccctttttccaaggggacctacccctattgcggtcctc

SEQ ID NO: 282 - DNA, 781 bp, Homo sapien
ggggttaggggcctgaagatctggtgtctgatgtttgcagagcccaaccctggaagaatgccaggcacctggcgaggaagccatggtctcttccttccttgacttagaacaactaggaggctcctaggttcagtcttactgggaaggggatgggaatgtgggccaaaggacagggcagaggctgatctaaatacgtgggccagctccactgaggaaactgagatggaccagtgtggcgtggaagaaaccaaggggagcagccaaatgtcctcttctccaggctgcctggcacagagctgggcacacaaccaaccctgcagaccagctgtccaatgggcaagggaaggagcaaggcaggtccatctgcagtctcggctgctgggaaggtgagacagtgcagggcattggaggctgactccacagtggacagagaagactttcagggagatcagctcagctcagtctgaggggcagggacaggaggagatagcgtttctgcggttatcaggaagggaagtggaggaggcagccaggaagatatcgggaagaaagaggaagggcgtgtgctagatcccgaagaggaaaaagcagctgaatttagcagcctcaggggtgtgaaggtcaaaagtatcaaggaatcttaagcccagggttctgggccaagaaagcagcactctctctcatttacatgggcatctgagatgaaacctggtgtccggggacttctaccaacctaggattcgtgggggagggcagtgggactggttcagaacctggctcc

SEQ ID NO: 283 - DNA, 969 bp, Homo sapien
gacctctcgaggtagccccagcccggggatccagagaaccatccctaccccttcctactgtctccagaccctacctctgcccagtgctaggaggaatttcctgacgccccttctcttcacccatttcctttttagcctggagagaagcccctgtcaccccgtttattttcatttctctctgcggagaagatccatctaacccctttctggccccagagtccagggaaaggatgatcactgtcagaagtcgtggcgcgggagcccactgggcgctttgtcacattccaccgaaagtcccgacttggtgacagtgtgcttcccttccctcgccaacagttccgagtgagctgtgctttagctctcgtgggggtgggtcaagggaggatttgaagagtcattgccccactttacccttttggagaaatggcttgaaatttgctgtgacacgggcagcatgggaatagtccttcctgaaccctggaaaggagctcctgccagccttgcacacactttgtcctggtgaaaggcagccctggagcaggtgtttttttggaactccaaacctgcccacccaacttgcttctgaaagggactctaaagggtccctttccgctcctctctgacgccttccctcagccagaattcccttggagaggaggcaagaggaaagccatggacaggggtcgctgctaacaccgcaagttcctcagaccctggcacaaaggccttggctacaggcctccaagtagggaggagggggaggagtggctgcctggccacagtgtgaccttcagaggcccccagagaaggacacctggcccctgcctgcctagaaccgcccctcctgtgccccctggccttggaaggggtatgaaatttccgtcccctttcctccttggggcccaggaggagtggagggtcccgggagaatattgtcagggggaaggcagggggtgtcatgggaatgcg

SEQ ID NO: 284 - DNA, 313 bp, Homo sapien
aattcacagaaagagctagagtgtcgaggtagaggtagcaattttaaatggagatgttagggaaatcctcactgagaaggtaacatttggtgaaaaaaaaaaaaagtggcaagcaagggaaccatccagatagggggcttgtaggtggtgggagatacgtgggatgaattgggacactttgagttgcatgtttgagaagtaatatgaaggcagagagcggataggagctgcggaacagatggaccaaatggacgggcaagatgccgcaaacacaggcaggggcgggggcagactgagggtgaagtgagtagca

SEQ ID NO: 285 - DNA, 1243 bp, Homo sapien
aggtgtagcttgactcataacatcactaaccctactaccaatggtgatgtgtaagcactttgtgctgggttaaagtttcaaacattttcttatagagattagatgatctaagcagtagagtcccttaaatcaaggttcagggccaggcgcggtggctcacgcctgtaatcccagcactttaggaggccgaggtgggcggatcacgaggtcaggagatcgagacaaccccgtctctactaaaaaaaatgcaaaacgttagctgggcatggtggtgggcgcctgtagtcccagctactagggaggctgagacaggagaatggcgtgaacccgggaggcggagcttgcagtaagccgagatcgcgccactgcactccagcctaggcgagagagcgagactccgtctcaaaaaaaaaaaaaatgagctgagcgtggtggcatatgcctgtaatcccagctactctagaggccgaggcaggagaattgcttgagcccggaaggtggaggttacagtgagccaagattgtgccactgcactccagcctgggtgacaaagactctgtctcaaaaaaaaaaaaaatatatagtaagtgcaatggagaaaataattcacagaaagagctagagtgtcgaggtagaggtagcaattttaaatggagatgttagggaaatcctcactgagaaggtaacatttggtgaaaaaaaaaaaaagtggcaagcaagggaaccatccagatagggggcttgtaggtggtgggagatacgtgggatgaattgggacactttgagttgcatgtttgagaagtaatatgaaggcagagagcggataggagctgcggaacagatggaccaaatggacgggcaagatgccgcaaacacaggcaggggcgggggcagactgagggtgaagtgagtagcaccgcagatcgggtgtgaagccgcactggctggaaggtgccactgttagcagaggagcgggggctgctcgtgggactccagagcccatcttgtctttcatgcccacagatggagatgggtgtcgtgagctggtggtgggctacacagaccgtgtggtgcgagctttccgctgggaggagctaggtgagggtcctgaacatctgacagggcagctggtgtccctcaagaaatggatgctggagggtcaggtggacagcctctcagtgactctggggccactgggtcttcctgaactgatggtgtctcagccaggttgtgcgtatgcaat

SEQ ID NO: 286 - DNA, 3179 bp, Homo sapien
ttcgtctcgctttgttctggttcttcctcgtgtcggtcgttattgttcttcttccgcttcgttctcattcgttggtcctttcccttgctctcttcctccttttcctcctccctcttcgtggttctcttccggcgctgtggtcttgttcgtttctctcggtctgtcctggcttccgtcttgttggctcttctccttctgtcttcttgcgtccggtttcctgttgcttgtctgtctttctcgcttctgctcgtcatctgtttctccttgttcttgctttttctctctccggtctcgccttctttccttgtctcctcctccccttttcttctctttgcgtgtgcttgtctcgctcgctctgtgttcttctgtctctgcttttgtcgtgtccgcttgtctcttgtcttcttcggcttgctttttctcttctctcctctccgttcgctgctgttttctgttctccgtgcctctgtcccttttgtcttcttcgtcttcttcgcttccttccgttccctccgctcctcttcctccgttcctctcctctcgtcgttcctcccgctctcccctttcgctgctgctctggcttccctcgctggccgtcctccctcttcgcctccctctccttccctctgtcgtttctcgttgttgttcttgtgtgttgttgtgtgtgctcgtgttgttctggttcttggttggtggttgtgtggtgtgtgcgctgtgtgtgttgtttgttgtgtttgtgcgctcgtggtgtactgctgagaagtcacaccaccagcgtacgtcgtttaaccggctatcgtgggcgcatcccccgagggtctccgagccgggcggtccggcggctgttcccgccttcttttttttgctccttgggccctgtccaaacggtcccgtacttggccctcgagggaactttggcgccccctttttttttttgcatgtccaccttcgcttttattgagtagttagtgttctcaagctggctcacacccatgcggtcagctggggcctagggtggctctttgcaaagctgaggggcaagctaaggaagccaggcaggtcaggggccctttcggccttctcaagcctccacctgagttctcgtcaatgccagtctccctggtatgattggggacattatcagagaaacatctaatagcgcacatctgggcacccacactctgcttcagttgcatccatcctcccaccccaaattcaactcctgacccaatacaaaagacttttttaaccaggatttcttcttgcaggaaagctgacttggaaacacggggaggtggcagggaggggcaaaaaggactctggcaagcagatccacttgtctgggtccctgcagtgaagaacccaagatccaggtacctcagcctggaagaaaccgtgcactgcaggtcttcccttctatcaaaactaaaagcaaggaacagaagtcaattgaaaccccaggtcatcctacccaccttctggcagtctctggataatgatctaaggaaataagcttacatttataattagaggataatttggagaatttatactatttacacggaccaccctgcaaagatcagggaaggtaagagactgctgggcagagaatggaaacaggctggggggttcctaatctcttttcaccattgcctttgttgttcccacccttcagctcctggcagggacagcagaggaatcagatactcttggggaacacaaggtcccagcagtggctagggtgtgactgctacttttgcataatcaggcagcagggagctatgaggagcagaacagtccctgcctgctgtcctcactcagaggcttggggtgcactgagccttggagtgcccgggatggtggacagcttgagcacaggggcaagggcagggctctactgtagctcaggaataaactgggaccagttgatgttgtcagggcccagtgggtcctcgtccaggccaggaaagctgatgtccagcaggatcttgctgaggctgtcattcattgtgtccaggaccaggccttctgtcagagaacgattggctgcaaggccagaaacctgtggctccggggagcctggcttggggacgtctatatctgagggagaagagttgccaaaggggacggagatgaggtctaagggttctgaactgaggagcctttgcggtgattcaagggggggagcactttgcaagggagtggtgctgagatccatcagccccagggggtcaggcaaggggtcagaggcaccctgggaggtttgtactgggctgaaatccagtccccctactttggctgggggcgtgagcctccaggattcaggggttctggggaggacagatttgctcggggtggaggagatgggcagcgtttccttaatgggtgtcttaaaaggtcctcccacttcctgggagtagctgagctgggaggcagggtcagaggagtctgctgggaacgggagctctgcggcccagcgggaagtactgggcccctctgagaagagcagctccggctcatccacacagggaggcagtagatgctgtttcctccgagaccggctcctctccctcctctccctgtgttgaatcacaagcatttccgagacacaccgggttggggacctaagcccactgtaggacttcttgggtcttggggtgggagattgggacgaatcctcccaggagtgagatgattcctctttgaaagatggggccggggagggccactcttccaagggagggctctccactttgatgggtctcgctaagtgtggcatttcctccccaggctggatttcttcctccttgatagtctgaactggaagcaaaggagaaaacccttctccaaacaggagtttctcctctttccctggtcctgcagaagaaagaggagctatcccctcctcagctagcagcacctgaaagggaaacagagataaggtgaaccaacggtcaccagacaggacgcacaaaaatatcacatacgggttctgatcctctttgtgtcgttttgaagtcttaaaatctattaaatatgagaatacgatgtatgttgaagttggtagttcaattctgggggtaaaagatgcgggtatgtagtatgtagtggcataattataatagcattcatccgagaggaaataaaattgcatgcttgtcttacactgtatacaaaga

SEQ ID NO: 287 - DNA, 3047 bp, Homo sapien
ttcgtctcgctttgttctggttcttcctcgtgtcggtcgttattgttcttcttccgcttcgttctcattcgttggtcctttcccttgctctcttcctccttttcctcctccctcttcgtggttctcttccggcgctgtggtcttgttcgtttctctcggtctgtcctggcttccgtcttgttggctcttctccttctgtcttcttgcgtccggtttcctgttgcttgtctgtctttctcgcttctgctcgtcatctgtttctccttgttcttgctttttctctctccggtctcgccttctttccttgtctcctcctccccttttcttctctttgcgtgtgcttgtctcgctcgctctgtgttcttctgtctctgcttttgtcgtgtccgcttgtctcttgtcttcttcggcttgctttttctcttctctcctctccgttcgctgctgttttctgttctccgtgcctctgtcccttttgtcttcttcgtcttcttcgcttccttccgttccctccgctcctcttcctccgttcctctcctctcgtcgttcctcccgctctcccctttcgctgctgctctggcttccctcgctggccgtcctccctcttcgcctccctctccttccctctgtcgtttctcgttgttgttcttgtgtgttgttgtgtgtgctcgtgttgttctggttcttggttggtggttgtgtggtgtgtgcgctgtgtgtgttgtttgttgtgtttgtgcgctcgtggtgtactgctgagaagtcacaccaccagcgtacgtcgtttaaccggctatcgtgggcgcatcccccgagggtctccgagccgggcggtccggcggctgttcccgccttcttttttttgctccttgggccctgtccaaacggtcccgtacttggccctcgagggaactttggcgccccctttttttttttgcatgtccaccttcgcttttattgagtagttagtgttctcaagctggctcacacccatgcggtcagctggggcctagggtggctctttgcaaagctgaggggcaagctaaggaagccaggcaggtcaggggccctttcggccttctcaagcctccacctgagttctcgtcaatgccagtctccctggtatgattggggacattatcagagaaacatctaatagcgcacatctgggcacccacactctgcttcagttgcatccatcctcccaccccaaattcaactcctgacccaatacaaaagacttttttaaccaggatttcttcttgcaggaaagctgacttggaaacacggggaggtggcagggaggggcaaaaaggactctggcaagcagatccacttgtctgggtccctgcagtgaagaacccaagatccaggtacctcagcctggaagaaaccgtgcactgcaggtcttcccttctatcaaaactaaaagcaaggaacagaagtcaattgaaaccccaggtcatcctacccaccttctggcagtctctggataatgatctaaggaaataagcttacatttataattagaggataatttggagaatttatactatttacacggaccaccctgcaaagatcagggaaggtaagagactgctgggcagagaatggaaacaggctggggggttcctaatctcttttcaccattgcctttgttgttcccacccttcagctcctggcagggacagcagaggaatcagatactcttggggaacacaaggtcccagcagtggctagggtgtgactgctacttttgcataatcaggcagcagggagctatgaggagcagaacagtccctgcctgctgtcctcactcagaggcttggggtgcactgagccttggagtgcccgggatggtggacagcttgagcacaggggcaagggcagggctctactgtagctcaggaataaactgggaccagttgatgttgtcagggcccagtgggtcctcgtccaggccaggaaagctgatgtccagcaggatcttgctgaggctgtcattcattgtgtccaggaccaggccttctgtcagagaacgattggctgcaaggccagaaacctgtggctccggggagcctggcttggggacgtctatatctgagggagaagagttgccaaaggggacggagatgaggtctaagggttctgaactgaggagcctttgcggtgattcaagggggggagcactttgcaagggagtggtgctgagatccatcagccccagggggtcaggcaaggggtcagaggcaccctgggaggtttgtactgggctgaaatccagtccccctactttggctgggggcgtgagcctccaggattcaggggttctggggaggacagatttgctcggggtggaggagatgggcagcgtttccttaatgggtgtcttaaaaggtcctcccacttcctgggagtagctgagctgggaggcagggtcagaggagtctgctgggaacgggagctctgcggcccagcgggaagtactgggcccctctgagaagagcagctccggctcatccacacagggaggcagtagatgctgtttcctccgagaccggctcctctccctcctctccctgtgttgaatcacaagcatttccgagacacaccgggttggggacctaagcccactgtaggacttcttgggtcttggggtgggagattgggacgaatcctcccaggagtgagatgattcctctttgaaagatggggccggggagggccactcttccaagggagggctctccactttgatgggtctcgctaagtgtggcatttcctccccaggctggatttcttcctccttgatagtctgaactggaagcaaaggagaaaacccttctccaaacaggagtttctcctctttccctggtcctgcagaagaaagaggagctatcccctcctcagctagcagcacctgaaagggaaacagagataaggtgaaccaacggtcaccagacaggacgcacaaaaatatcacatacgggttctgatcctctttgtgtcgttttgaagtcttaaaatctattaaatatgagaatacg

SEQ ID NO: 288 - DNA, 2994 bp, Homo sapien
ttcgtctcgctttgttctggttcttcctcgtgtcggtcgttattgttcttcttccgcttcgttctcattcgttggtcctttcccttgctctcttcctccttttcctcctccctcttcgtggttctcttccggcgctgtggtcttgttcgtttctctcggtctgtcctggcttccgtcttgttggctcttctccttctgtcttcttgcgtccggtttcctgttgcttgtctgtctttctcgcttctgctcgtcatctgtttctccttgttcttgctttttctctctccggtctcgccttctttccttgtctcctcctccccttttcttctctttgcgtgtgcttgtctcgctcgctctgtgttcttctgtctctgcttttgtcgtgtccgcttgtctcttgtcttcttcggcttgctttttctcttctctcctctccgttcgctgctgttttctgttctccgtgcctctgtcccttttgtcttcttcgtcttcttcgcttccttccgttccctccgctcctcttcctccgttcctctcctctcgtcgttcctcccgctctcccctttcgctgctgctctggcttccctcgctggccgtcctccctcttcgcctccctctccttccctctgtcgtttctcgttgttgttcttgtgtgttgttgtgtgtgctcgtgttgttctggttcttggttggtggttgtgtggtgtgtgcgctgtgtgtgttgtttgttgtgtttgtgcgctcgtggtgtactgctgagaagtcacaccaccagcgtacgtcgtttaaccggctatcgtgggcgcatcccccgagggtctccgagccgggcggtccggcggctgttcccgccttcttttttttgctccttgggccctgtccaaacggtcccgtacttggccctcgagggaactttggcgccccctttttttttttgcatgtccaccttcgcttttattgagtagttagtgttctcaagctggctcacacccatgcggtcagctggggcctagggtggctctttgcaaagctgaggggcaagctaaggaagccaggcaggtcaggggccctttcggccttctcaagcctccacctgagttctcgtcaatgccagtctccctggtatgattggggacattatcagagaaacatctaatagcgcacatctgggcacccacactctgcttcagttgcatccatcctcccaccccaaattcaactcctgacccaatacaaaagacttttttaaccaggatttcttcttgcaggaaagctgacttggaaacacggggaggtggcagggaggggcaaaaaggactctggcaagcagatccacttgtctgggtccctgcagtgaagaacccaagatccaggtacctcagcctggaagaaaccgtgcactgcaggtcttcccttctatcaaaactaaaagcaaggaacagaagtcaattgaaaccccaggtcatcctacccaccttctggcagtctctggataatgatctaaggaaataagcttacatttataattagaggataatttggagaatttatactatttacacggaccaccctgcaaagatcagggaaggtaagagactgctgggcagagaatggaaacaggctggggggttcctaatctcttttcaccattgcctttgttgttcccacccttcagctcctggcagggacagcagaggaatcagatactcttggggaacacaaggtcccagcagtggctagggtgtgactgctacttttgcataatcaggcagcagggagctatgaggagcagaacagtccctgcctgctgtcctcactcagaggcttggggtgcactgagccttggagtgcccgggatggtggacagcttgagcacaggggcaagggcagggctctactgtagctcaggaataaactgggaccagttgatgttgtcagggcccagtgggtcctcgtccaggccaggaaagctgatgtccagcaggatcttgctgaggctgtcattcattgtgtccaggaccaggccttctgtcagagaacgattggctgcaaggccagaaacctgtggctccggggagcctggcttggggacgtctatatctgagggagaagagttgccaaaggggacggagatgaggtctaagggttctgaactgaggagcctttgcggtgattcaagggggggagcactttgcaagggagtggtgctgagatccatcagccccagggggtcaggcaaggggtcagaggcaccctgggaggtttgtactgggctgaaatccagtccccctactttggctgggggcgtgagcctccaggattcaggggttctggggaggacagatttgctcggggtggaggagatgggcagcgtttccttaatgggtgtcttaaaaggtcctcccacttcctgggagtagctgagctgggaggcagggtcagaggagtctgctgggaacgggagctctgcggcccagcgggaagtactgggcccctctgagaagagcagctccggctcatccacacagggaggcagtagatgctgtttcctccgagaccggctcctctccctcctctccctgtgttgaatcacaagcatttccgagacacaccgggttggggacctaagcccactgtaggacttcttgggtcttggggtgggagattgggacgaatcctcccaggagtgagatgattcctctttgaaagatggggccggggagggccactcttccaagggagggctctccactttgatgggtctcgctaagtgtggcatttcctccccaggctggatttcttcctccttgatagtctgaactggaagcaaaggagaaaacccttctccaaacaggagtttctcctctttccctggtcctgcagaagaaagaggagctatcccctcctcagctagcagcaccttgggggcaatgcggactcgcttgctatggcgggcaagctctgagctcatgagggaagccgccaggggcaatg

SEQ ID NO: 289 - DNA, 2974 bp, Homo sapien
ttcgtctcgctttgttctggttcttcctcgtgtcggtcgttattgttcttcttccgcttcgttctcattcgttggtcctttcccttgctctcttcctccttttcctcctccctcttcgtggttctcttccggcgctgtggtcttgttcgtttctctcggtctgtcctggcttccgtcttgttggctcttctccttctgtcttcttgcgtccggtttcctgttgcttgtctgtctttctcgcttctgctcgtcatctgtttctccttgttcttgctttttctctctccggtctcgccttctttccttgtctcctcctccccttttcttctctttgcgtgtgcttgtctcgctcgctctgtgttcttctgtctctgcttttgtcgtgtccgcttgtctcttgtcttcttcggcttgctttttctcttctctcctctccgttcgctgctgttttctgttctccgtgcctctgtcccttttgtcttcttcgtcttcttcgcttccttccgttccctccgctcctcttcctccgttcctctcctctcgtcgttcctcccgctctcccctttcgctgctgctctggcttccctcgctggccgtcctccctcttcgcctccctctccttccctctgtcgtttctcgttgttgttcttgtgtgttgttgtgtgtgctcgtgttgttctggttcttggttggtggttgtgtggtgtgtgcgctgtgtgtgttgtttgttgtgtttgtgcgctcgtggtgtactgctgagaagtcacaccaccagcgtacgtcgtttaaccggctatcgtgggcgcatcccccgagggtctccgagccgggcggtccggcggctgttcccgccttcttttttttgctccttgggccctgtccaaacggtcccgtacttggccctcgagggaactttggcgccccctttttttttttgcatgtccaccttcgcttttattgagtagttagtgttctcaagctggctcacacccatgcggtcagctggggcctagggtggctctttgcaaagctgaggggcaagctaaggaagccaggcaggtcaggggccctttcggccttctcaagcctccacctgagttctcgtcaatgccagtctccctggtatgattggggacattatcagagaaacatctaatagcgcacatctgggcacccacactctgcttcagttgcatccatcctcccaccccaaattcaactcctgacccaatacaaaagacttttttaaccaggatttcttcttgcaggaaagctgacttggaaacacggggaggtggcagggaggggcaaaaaggactctggcaagcagatccacttgtctgggtccctgcagtgaagaacccaagatccaggtacctcagcctggaagaaaccgtgcactgcaggtcttcccttctatcaaaactaaaagcaaggaacagaagtcaattgaaaccccaggtcatcctacccaccttctggcagtctctggataatgatctaaggaaataagcttacatttataattagaggataatttggagaatttatactatttacacggaccaccctgcaaagatcagggaaggtaagagactgctgggcagagaatggaaacaggctggggggttcctaatctcttttcaccattgcctttgttgttcccacccttcagctcctggcagggacagcagaggaatcagatactcttggggaacacaaggtcccagcagtggctagggtgtgactgctacttttgcataatcaggcagcagggagctatgaggagcagaacagtccctgcctgctgtcctcactcagaggcttggggtgcactgagccttggagtgcccgggatggtggacagcttgagcacaggggcaagggcagggctctactgtagctcaggaataaactgggaccagttgatgttgtcagggcccagtgggtcctcgtccaggccaggaaagctgatgtccagcaggatcttgctgaggctgtcattcattgtgtccaggaccaggccttctgtcagagaacgattggctgcaaggccagaaacctgtggctccggggagcctggcttggggacgtctatatctgagggagaagagttgccaaaggggacggagatgaggtctaagggttctgaactgaggagcctttgcggtgattcaagggggggagcactttgcaagggagtggtgctgagatccatcagccccagggggtcaggcaaggggtcagaggcaccctgggaggtttgtactgggctgaaatccagtccccctactttggctgggggcgtgagcctccaggattcaggggttctggggaggacagatttgctcggggtggaggagatgggcagcgtttccttaatgggtgtcttaaaaggtcctcccacttcctgggagtagctgagctgggaggcagggtcagaggagtctgctgggaacgggagctctgcggcccagcgggaagtactgggcccctctgagaagagcagctccggctcatccacacagggaggcagtagatgctgtttcctccgagaccggctcctctccctcctctccctgtgttgaatcacaagcatttccgagacacaccgggttggggacctaagcccactgtaggacttcttgggtcttggggtgggagattgggacgaatcctcccaggagtgagatgattcctctttgaaagatggggccggggagggccactcttccaagggagggctctccactttgatgggtctcgctaagtgtggcatttcctccccaggctggatttcttcctccttgatagtctgaactggaagcaaaggagaaaacccttctccaaacaggagtttctcctctttccctggtcctgcagaagaaagaggagctatcccctcctcagctagcagcacccttgcgggccaattccccgactcgctagatatctgcgcggcagagctccgagc

SEQ ID NO: 290 - DNA, 2053 bp, Homo sapien
ttcgtctcgctttgttctggttcttcctcgtgtcggtcgttattgttcttcttccgcttcgttctcattcgttggtcctttcccttgctctcttcctccttttcctcctccctcttcgtggttctcttccggcgctgtggtcttgttcgtttctctcggtctgtcctggcttccgtcttgttggctcttctccttctgtcttcttgcgtccggtttcctgttgcttgtctgtctttctcgcttctgctcgtcatctgtttctccttgttcttgctttttctctctccggtctcgccttctttccttgtctcctcctccccttttcttctctttgcgtgtgcttgtctcgctcgctctgtgttcttctgtctctgcttttgtcgtgtccgcttgtctcttgtcttcttcggcttgctttttctcttctctcctctccgttcgctgctgttttctgttctccgtgcctctgtcccttttgtcttcttcgtcttcttcgcttccttccgttccctccgctcctcttcctccgttcctctcctctcgtcgttcctcccgctctcccctttcgctgctgctctggcttccctcgctggccgtcctccctcttcgcctccctctccttccctctgtcgtttctcgttgttgttcttgtgtgttgttgtgtgtgctcgtgttgttctggttcttggttggtggttgtgtggtgtgtgcgctgtgtgtgttgtttgttgtgtttgtgcgctcgtggtgtactgctgagaagtcacaccaccagcgtacgtcgtttaaccggctatcgtgggcgcatcccccgagggtctccgagccgggcggtccggcggctgttcccgccttcttttttttgctccttgggccctgtccaaacggtcccgtacttggccctcgagggaactttggcgccccctttttttttttgcatgtccaccttcgcttttattgagtagttagtgttctcaagctggctcacacccatgcggtcagctggggcctagggtggctctttgcaaagctgaggggcaagctaaggaagccaggcaggtcaggggccctttcggccttctcaagcctccacctgagttctcgtcaatgccagtctccctggtatgattggggacattatcagagaaacatctaatagcgcacatctgggcacccacactctgcttcagttgcatccatcctcccaccccaaattcaactcctgacccaatacaaaagacttttttaaccaggatttcttcttgcaggaaagctgacttggaaacacggggaggtggcagggaggggcaaaaaggactctggcaagcagatccacttgtctgggtccctgcagtgaagaacccaagatccaggtacctcagcctggaagaaaccgtgcactgcaggtcttcccttctatcaaaactaaaagcaaggaacagaagtcaattgaaaccccaggtcatcctacccaccttctggcagtctctggataatgatctaaggaaataagcttacatttataattagaggataatttggagaatttatactatttacacggaccaccctgcaaagatcagggaaggtaagagactgctgggcagagaatggaaacaggctggggggttcctaatctcttttcaccattgcctttgttgttcccacccttcagctcctggcagggacagcagaggaatcagatactcttggggaacacaaggtcccagcagtggctagggtgtgactgctacttttgcataatcaggcagcagggagctatgaggagcagaacagtccctgcctgctgtcctcactcagaggcttggggtgcactgagccttggagtgcccgggatggtggacagcttgagcacaggggcaagggcagggctctactgtagctcaggaataaactgggaccagttgatgttgtcagggcccagtgggtcctcgtccaggccaggaaagctgatgtccagcaggatcttgctgaggctgtcattcattgtgtccaggaccaggccttctcaaccccagcctcgywcctagcg

SEQ ID NO: 291 - DNA, 1628 bp, Homo sapien
cttaatttaagtattgtattttgaccaaggaaggggggcagagtaatggtggtgacagatggagttgcaccgaggagacatggcttggggcagggaggaaggaggtagaggatcctggttaggtccaggctagggagagaggtgccctttctccctccctccctctcccatcagggcagagcagaaaggagagcaggtgaagtgagtgcaggcagggttgttaatgaaagtgtgtccctgggaggcctctcaccttgcagttgaccagaagagctggaatctctgtcctgctggtcttcctcctgctctcctggccatgaatcaggtcctgcatccggggaggctccccctgaagccaattcgggtttccctccaccaggcgtctttggatcacactgcgcggctgctggctccatcacaaaacaatgaagactccccacagctctctcggatccttggaacaccttcttaagttcataacctgtctccagacctgttacctttcaaatacatctgcttggagcttcagcctggaagctaaaaaccttgctactccaaaatgtggtcctcagatcagcaactttaacatcatttcgaagcctcttaaaaatgcactctcatacctaccgaatcagatgtttcattgtgacaagatccccaggtgattcatgtgcaggttaaagtttgagaagcaccaaagtaaaacatgaaactaaccatgtcttctcttatttaaaatgcatcaaagaccccccaccctaccccgcattgctttcatgatagagctcaagcttttgaaggtgatccacagtccacatgaccgggccgtgcctccttccctgccactctgtttatgggccccagaagcaccgctcataccaggccgctttttgcctccatgtcttcactcctctctcctctctcctctcttcctgaaactcctcttcctcactcttctcgaggctagactggatgactggcttaacacactttatttgagagagaggttgtatcttaagtttgagattctgtgtacatcctataatgcaggatgtaccctctccaggataccctctctgagttcttcatgctcctctctccatacacgccaagctggggtcccttgtcttagctcccttttccatgcttctcacaaatgttatgtatggattttactcccccattagcctggagagcgcttgagtctacctcactcatttttatatcccagggcatggctcagcatctagtaggcactcaataaatgcttgctgcagactgactcttcccccaggctctatgcacctctccacctgccctctctccttgggatcctgggattgtttttctacccttagattaatgaggcccttggggttgctcctggcagcaaggctgccagcagtagacccagtgctgggaaaagttcagcgagctctgggattggctggagagactggctctgcacttcccatcttccaccttcccacgatgaacacaggcttcaggcccctcccgctgttgtgcagtttgctcctcagccatcccagggagggagacgatggggtcttccctgcctgttgtgcctttgctcccagagccataggaggtaactgctagggatcaat

SEQ ID NO: 292 - DNA, 5717 bp, Homo sapien
gtccctgtgtaactgctttcttactgggcttacctcacatcacagccctgtgtttgtggtttgtgtctgggtcctcttggtatttcaaaagtagtagattcttacgcctgcagccaacaataatcactaactcaagcatttatggagtaagcctagcactgtactgacagcatcacatgagtgaaactgaatccttgcaaccatcctacaaagaaggtataactttaataaccctatttacagataagaaaaccaagactcagaagttaaatggaaaggtgaggtctctgaactaatccagactctcccatgaggttcctttggcaagtcctgggcttctgtcctcatctgcaaaatcgaaagcattcctgaggtttcttccagctctgcatcatcagagttgggaagcccgcctccaagcccggaagacccgcctcctctgtaaggttaaaggaggaagaggcagagattggaggttcaggcagtgacgtaacttgctgccttaggtggccttccgctctggcggctgtcgcgacgggggttcagggaatatttactgggcctctccgctccctctgctcttggaggtgccatgaggtcagttagctacgtgcagcgcgtggcgctggagttcagcgggagcctcttcccgcacgcaatctgcctcggagacgttgataacgatacgttaaatgaactggtggtgggagacaccagcgggaaggtgtctgtgtataaaaatgatgacagtcggccatggctcacctgttcctgccagggaatgctgacttgcgttggggttggagacgtgtgtaataaaggaaagaacctgttggtggcagtgagtgctgaaggctggtttcatttgtttgacctgacacctgccaaggtgttggatgcttctgggcaccacgagacactaatcggagaggagcagcgtccagtcttcaagcagcacatccctgccaacaccaaggtcatgctgatcagcgacatcgatggagatgggtgtcgtgagctggtggtgggctacacagaccgtgtggtgcgagctttccgctgggaggagctaggtgagggtcctgaacatctgacagggcagctggtgtccctcaagaaatggatgctggagggtcaggtggacagcctctcagtgactctggggccactgggtcttcctgaactgatggtgtctcagccaggttgtgcgtatgcaattctactgtgtacctggaaaaaggacactgggtcccctcctgcctctgaagggcccacggatggtagtagggagaccccagctgcccgagacgtggtgctgcaccagacatctggccgtatccacaacaagaatgtctccactcacctaattggcaacatcaaacaaggccacggcactgagagtagtggctctggcctctttgccctgtgcaccctggatgggacactgaagctcatggaagaaatggaagaagcagacaagctgctgtggtcagtgcaggtggatcaccagctctttgccctggagaaactggatgtcaccggcaacgggcatgaggaggtagttgcatgcgcctgggatggacagacatatatcattgatcacaaccgcaccgtcgtccgcttccaagtggatgaaaatatccgtgccttctgtgcaggtgacccccgcccccatggcccctttctaaccacacttaagttagataggcgtgttaggcatgccagggaagtgtttgcccctcacttccctttctgacgtatcccctgatgtaagtcttcattcaccagtgagttcttcagctcttttgtttgggggtgaggggtgagtgatgtaagtcttcattcaccgtgagttcttcagctcttttgtttgggggtgaggggtggtcactacattgccatcttgacaattttaaataagaagaaataaaagacagtaacatctccaccccgaatattttaaagaatggaatgagtttctgtcatctgtctgggatgtgtgaagacatcaggaagttcttttccacctcagcatgccaggtctctgtgaagaaagttctcctagagcattttcattagttccaaatcaggggccttgggaggcagcactcactctctgggtgactgggggatgcatttggaaggagggattggcacctaagagaagctttactttctgatcgtgttttgctagtctcgcccttgggcgagcaatgccatccctcatcactccagggatatcactaagatgggaaaagcaataaatagcacctttttggatgctattctgcccgggttttgttactatggtttttctacatctgaagtgagccaggtcttttcccatcttacttgttttactgagttcccaacagagaagaaataacctttaatttttttcctgacatcagtgggaggatggaaagtgctgactcggaggtctgtgtcttgctgtctgccccccactgtcggcactgaaacttcctgacctttatctccctgccaacatcttccaggcctgtacgcctgcaaagagggccgcaacagcccctgcctcgtatatgtcactttcaaccagaagatctatgtgtactgggaggtgcagctggagcggatggagtctaccaatctggtgaaactgctggagaccaagccggagtaccacagcctgctgcaggagctgggcgtggatcctgacgacctccctgtgactcgtgccctgcttcaccaaacgctctaccatccagaccagccaccacagtgtgctccctcaagcctccaggatcccacctagctgtacttgcctcatagctggtgaaggattcttctgaacccccaccctaccccctaaaggtatctgtggtattggcaggatagggaatatgcattacagaaatgcaggatttgactctgggcatgaaagatggcagcagccctagggtgaccgtgaactatagacctcgcagtcttttcggtgaaagaagagacaagttgaccctctgcccatttccttatggacctcacccatcatgccagcagggtcataggaccctggccttgttccaaatcatctgggacatgacccactccccactgtcactgtgttgaaaacagagacttgtttgtgtggccccaacacccataaggaaaccaggctttaggcccaggggagcagtggaggtaagggctccaccccatcttaagctctgtcttccgtggcacaattccaagttcttgacgttagtaattgttaaaggaatggcaaactgttttgttttgaaggatctttctacagtctggtcttacccatgttcctagcaaccctgagatgattttcttccatttaccaaagcagccgggtcagtgctttctcacgttgccgtattcttcaggcgtctttggatcacactgcgcggctgctggctccatcacaaaacaatgaaggaggaagtgggacgcagagagaaacgcacatggggagaacgccacgtgaaggctgaggtcgggataatgcatctgcaagccaaggaacacctaagaggaccagcaaaccaccagaagccaggggagaggcgtggaacagaccctgccttacagctgtcagaaggaaccaaccctgccaacaccttcctgttgtactttcagcttccagaactaaaaaagagaaaaaagcagggtaagaagagaaagtggtggagctgagctgggcagagtggctcttttagaagcgatgacatttacacataggtcactatggagagggccatgcagacacctggaggagtgccacagacacagggaagagtgcaggctgacttggaaacacggggaggtggcagggaggggcaaaaaggactctggcaagcagatccacttgtctgggtccctgcagtgaagaacccaagatccaggtacctcagcctggaagaaaccgtgcactgcaggtcttcccttctatcaaaactaaaagcaaggaacagaagtcaattgaaaccccaggtcatcctacccaccttctggcagtctctggataatgatctaaggaaataagcttacatttataattagaggataatttggagaatttatactatttacacggaccaccctgcaaagatcagggaaggtaagagactgctgggcagagaatggaaacaggctggggggttcctaatctcttttcaccattgcctttgttgttcccacccttcagctcctggcagggacagcagaggaatcagatactcttggggaacacaaggtcccagcagtggctagggtgtgactgctacttttgcataatcaggcagcagggagctatgaggagcagaacagtccctgcctgctgtcctcactcagaggcttggggtgcactgagccttggagtgcccgggatggtggacagcttgagcacaggggcaagggcagggctctactgtagctcaggaataaactgggaccagttgatgttgtcagggcccagtgggtcctcgtccaggccaggaaagctgatgtccagcaggatcttgctgaggctgtcattcattgtgtccaggaccaggccttctgtcagagaacgattggctgcaaggccagaaacctgtggctccggggagcctggcttggggacgtctatatctgagggagaagagttgccaaaggggacggagatgaggtctaagggttctgaactgaggagcctttgcggtgattcaagggggggagcactttgcaagggagtggtgctgagatccatcagccccagggggtcaggcaaggggtcagaggcaccctgggaggtttgtactgggctgaaatccagtccccctactttggctgggggcgtgagcctccaggattcaggggttctggggaggacagatttgctcggggtggaggagatgggcagcgtttccttaatgggtgtcttaaaaggtcctcccacttcctgggagtagctgagctgggaggcagggtcagaggagtctgctgggaacgggagctctgcggcccagcgggaagtactgggcccctctgagaagagcagctccggctcatccacacagggaggcagtagatgctgtttcctccgagaccggctcctctccctcctctccctgtgttgaatcacaagcatttccgagacacaccgggttggggacctaagcccactgtaggacttcttgggtcttggggtgggagattgggacgaatcctcccaggagtgagatgattcctctttgaaagatggggccggggagggccactcttccaagggagggctctccactttgatgggtctcgctaagtgtggcatttcctccccaggctggatttcttcctccttgatagtctgaactggaagcaaaggagaaaacccttctccaaacaggagtttctcctctttccctggtcctgcagaagaaagaggagctatcccctcctcagctagcagcacctgaaagggaaacagagataaggtgaaccaacggtcaccagacaggacgcacaaaaatatcacatacgggttctgatcctctttgtgtcgttttgaagtcttaaaatctattaaatatgagaatacgatgtatgttgaagttggtagttcaattctgggggtaaaagatgcgggtatgtagtatgtagtggcataattataatagcattcatccgagaggaaataaaattgcatgcttgtcttacactgtatacaaaga

SEQ ID NO: 293 - DNA, 874 bp, Homo sapien
gtccctgtgtaactgctttcttactgggcttacctcacatcacagccctgtgtttgtggtttgtgtctgggtcctcttggtatttcaaaagtagtagattcttacgcctgcagccaacaataatcactaactcaagcatttatggagtaagcctagcactgtactgacagcatcacatgagtgaaactgaatccttgcaaccatcctacaaagaaggtataactttaataaccctatttacagataagaaaaccaagactcagaagttaaatggaaaggtgaggtctctgaactaatccagactctcccatgaggttcctttggcaagtcctgggcttctgtcctcatctgcaaaatcgaaagcattcctgaggtttcttccagctctgcatcctgtaggattccaagaatgtaaaactgcatgtaaccgtggaacatctagagataagtcttagtttatgtaacattaaaactgtctagtgaggatgttttgttaaaatgcctacaagtctttcagcctaaaaataatcctgccacatactcaagtctgccctgggtcagtgctacaagttcatttcccagtcagttgtccctgcctaccgacacttaaatctttctatatgcagagaaatgtgcctgaagaaagaaaagttagtagcaagcagtactgtgagcttttaacaagctttgcaagtggtctctagaaaaatttaaaatagggtttatcttgccctagtgctggttctaacatcgagttccatgaattttatctcccaagtatttctactccctccatactagtaccgctccctcccatcaccatgcactccagcctgctctcctgcaaatcccaggctcctatctgggattccct

SEQ ID NO: 294 - DNA, 675 bp, Homo sapien
tgaaggaggagcagaagagcaacacggcagggagccagtctcagataagaaaaccaagactcagaagttaaatggaaaggtgaggtctctgaactaatccagactctcccatgaggttcctttggcaagtcctgggcttctgtcctcatctgcaaaatcgaaagcattcctgaggtttcttccagctctgcatcctgtaggattccaagaatgtaaaactgcatgtaaccgtggaacatctagagataagtcttagtttatgtaacattaaaactgtctagtgaggatgttttgttaaaatgcctacaagtctttcagcctaaaaataatcctgccacatactcaagtctgccctgggtcagtgctacaagttcatttcccagtcagttgtccctgcctaccgacacttaaatctttctatatgcagagaaatgtgcctgaagaaagaaaagttagtagcaagcagtactgtgagcttttaacaagctttgcaagtggtctctagaaaaatttaaaatagggtttatcttgccctagtgctggttctaacatcgagttccatgaattttatctcccaagtatttctactccctccatactagtaccgctccctcccatcaccatgcactccagcctgctctcctgcaaatcccaggctcctatctgggattccct

SEQ ID NO: 295 - DNA, 1674 bp, Homo sapien
gtccctgtgtaactgctttcttactgggcttacctcacatcacagccctgtgtttgtggtttgtgtctgggtcctcttggtatttcaaaagtagtagattcttacgcctgcagccaacaataatcactaactcaagcatttatggagtaagcctagcactgtactgacagcatcacatgagtgaaactgaatccttgcaaccatcctacaaagaaggtataactttaataaccctatttacagataagaaaaccaagactcagaagttaaatggaaaggtgaggtctctgaactaatccagactctcccatgaggttcctttggcaagtcctgggcttctgtcctcatctgcaaaatcgaaagcattcctgaggtttcttccagctctgcatcatcagagttgggaagcccgcctccaagcccggaagacccgcctcctctgtaaggttaaaggaggaagaggcagagattggaggttcaggcagtgacgtaacttgctgccttaggtggccttccgctctggcggctgtcgcgacgggggttcagggaatatttactgggcctctccgctccctctgctcttggaggtgccatgaggtcagttagctacgtgcagcgcgtggcgctggagttcagcgggagcctcttcccgcacgcaatctgcctcggagacgttgataacgatacgttaaatgaactggtggtgggagacaccagcgggaaggtgtctgtgtataaaaatgatgacagtcggccatggctcacctgttcctgccagggaatgctgacttgcgttggggttggagacgtgtgtaataaaggaaagaacctgttggtggcagtgagtgctgaaggctggtttcatttgtttgacctgacacctgccaaggtgttggatgcttctgggcaccacgagacactaatcggagaggagcagcgtccagtcttcaagcagcacatccctgccaacaccaaggtcatgctgatcagcgacatcgtgggcatgcctacctttgcaggcagccaggagagtaggagtcagtggatactagagcatatcccaagggattggggtgagagggagaatccgtattcatgtatgcatttgttatgtgctgagctcccatgataagccaggcatcactcaaggcactggaattgccatagtgaataaatagacaaaaattgctgccctcctgggccttattatgaagaaacagaaaagaaacaatataggctaggtgtgctgcctctcgcctgtgataccaacgctttgggaggctgagatgggaggatcacttgaggccaggagttccaggctgtagtgagctatgatctcaccactgcactccactccagcgtgggaccctgtctctatttaaaaaaggaaaagaaaagaaaaactatacattttgtaagataattaagtagtatattagaaggtagtaagtacacggccagacgtgatggctcatccctataatcccacgactttgggaggccaaggcaggcagatcacttgagttcaggagtttgagaccagcctggcccacacggtgaaactctgtccctactaaactgaggcaggagaatcgcttgaacccgggagacggatgttgcagtgacccaggatcatgccactgcactctagcctaggcaacagactccgtctcc

SEQ ID NO: 296 - DNA, 870 bp, Homo sapien
gatagttctagaaatcagaaagaatgctgaataggtgaagtctgagtggtgacacctcactgtcctgtctgcctcacaggagcagttctctacaaggctcttccaccacgagacactaatcggagaggagcagcgtccagtcttcaagcagcacatccctgccaacaccaaggtcatgctgatcagcgacatcgtgggcatgcctacctttgcaggcagccaggagagtaggagtcagtggatactagagcatatcccaagggattggggtgagagggagaatccgtattcatgtatgcatttgttatgtgctgagctcccatgataagccaggcatcactcaaggcactggaattgccatagtgaataaatagacaaaaattgctgccctcctgggccttattatgaagaaacagaaaagaaacaatataggctaggtgtgctgcctctcgcctgtgataccaacgctttgggaggctgagatgggaggatcacttgaggccaggagttccaggctgtagtgagctatgatctcaccactgcactccactccagcgtgggaccctgtctctatttaaaaaaggaaaagaaaagaaaaactatacattttgtaagataattaagtagtatattagaaggtagtaagtacacggccagacgtgatggctcatccctataatcccacgactttgggaggccaaggcaggcagatcacttgagttcaggagtttgagaccagcctggcccacacggtgaaactctgtccctactaaactgaggcaggagaatcgcttgaacccgggagacggatgttgcagtgacccaggatcatgccactgcactctagcctaggcaacagactccgtctcc

SEQ ID NO: 297 - DNA, 1141 bp, Homo sapien
cttcaggtgattcttatcttcagagaggtttgggccacactgactagtaagttgcctgacataggaaggtgcttattcagtgcttagaattagtgttcatttatttacaaaatatatcattagggcttttcatgtgctcacacttgttggttttgagaatacagtggaagatgagacacacaaactgtctcgtgtagctgtgataaatgtgcacaaggcgatatggcagtggcaacgaggggaggggggttaccttggattggtagtcagggagagctctctgagaagatgacatttatgctaagatatgaatgagaaggagctggtcatgcggagatccatctggagggaagactttcagccaggtgccaacaaggaagcaagcatgaggtatttgggaacagaaggaaggctggtgtggcagagtcacgagcagtgaggggagagtgcttggagatgaagtcagagaagtggacaaagatgagaacttgtaagactttttggtcatggttagaagttggattttattctaagtgtgatgggaaaccattggagggtttaagcagaggaggatgaagatctgatttatattttacgaagaatctatctggttgcttgagaattggttatgggatgggggtgacgggattgcgagcagtcttgcaaatatgagttgggagaagcgaccagctctgaggtatgctagtgggttgacaggatgattaatggagtcagtgtcaagtggtaaagagaacagatgaaataagagtttctgatggcgctgtttcctgagatgtgttctgggacaggagtgggtttggcagaaaggaaatagaaacttctgttttgaatgtgttgaatttgaggggcctgttggaaccaagtggagatgttaagtcggcagataatttctaccacttgagttcggggaagcagttgtggcctgagatatgattttgagagtctttgatgcatgcatgatattcagagccgtggaatttgttgatcttatctgaggagagagcacagatgaggaaagaagaagcctgtgacccagcccatggggctccccaatgtatagagattgagagaagagaaaggaggctcagagtagctagtgagggaggagaaaaatcaggag

SEQ ID NO: 298 - DNA, 1140 bp, Homo sapien
cttcaggtgattcttatcttcagagaggtttgggccacactgactagtaagttgcctgacataggaaggtgcttattcagtgcttagaattagtgttcatttatttacaaaatatatcattagggcttttcatgtgctcacacttgttggttttgagaatacagtggaagatgagacacacaaactgtctcgtgtagctgtgataaatgtgcacaaggcgatatggcagtggcaacgaggggaggggggttaccttggattggtagtcagggagagctctctgagaagatgacatttatgctaagatatgaatgagaaggagctggtcatgcggagatccatctggagggaagactttcagccaggtgccaacaaggaagcaagcatgaggtatttgggaacagaaggaaggctggtgtggcagagtcacgagcagtgaggggagagtgcttggagatgaagtcagagaagtggacaaagatgagaacttgtaagactttttggtcatggttagaagttggattttattctaagtgtgatgggaaaccattggagggtttaagcagaggaggatgaagatctgatttatattttagaagaatctatctggttgcttgagaattggttatgggatgggggtgacgggattgcgagcagtcttgcaaatatgagttgggagaagcgaccagctctgaggtatgctagtgggttgacaggatgattaatggagtcagtgtcaagtggtaaagagaacagatgaaataagagtttctgatggcgctgtttcctgagatgtgttctgggacaggagtgggtttggcagaaaggaaatagaaacttctgttttgaatgtgttgaatttgaggggcctgttggaaccaagtggagatgttaagtcggcagataatttctaccacttgagttcggggaagcagttgtggcctgagatatgattttgagagtctttgatgcatgcatgatattcagagccgtggaatttgttgatcttatctgaggagagagcacagatgaggaaagaagaagcctgtgacccagcccatggggctccccaatgtatagagattgagagaagagaaaggaggctcagagtagctagtgagggaggagaaaaatcaggag

SEQ ID NO: 299 - DNA, 834 bp, Homo sapien
  misc_feature (301)..(375): n=a,c,g or t
atgtaggccttctgcttgattttgcggtgaacctaatattgctgtaaaaaacaaaatcaatttttaaaaaatgacagctttttattgggtattctgtctctatctcactctcttgtcctggggagtgagcttggaaccaaatttcccccagttgaaccagaaaaaacagagaaataagtgtttgtcatttttagctgctaaattttggggataatttatcctgcagttacatataactaatatacatgatatatctacatatctttttctacccttctgttttcagattatgttttctctnnnnnnnnnnnnnnnnnnnnnnnnnnnnnnnnnnnnnnnnnnnnnnnnnnnnnnnnnnnnnnnnnnnnnnnnnnntacagggttgaatttaaatctaccatcttggtatatgatttctatctgtcccatctgattgttgttcacctgtgtctttcttcctgttttcccttggtgaatgcagtaatttttagtattccatttagtataagtgtacatatttttagtatttattttttctctcccctgttaacctcttctgtgtcttgtgtgagtttgtgtggtttttctaggaattgcaatatgcatccttgacatatctattgtctcatgaaggatgtaagatattccaaaagtgtaatttccttaaccgactttcctggcccttatgttcttgtcatgtattttatttctatgtataacactataatacatatattgttattagttttgctttagttagtagtgattttatttatttttattgtcttatttttaattttgatttttaaaataaaatttaccatctttactatg

SEQ ID NO: 300 - DNA, 2069 bp, Homo sapien
gtgtcagtattttcacctttgtgtaatccccttccctagaatatccactggatttagtgattcagtactgacaagtttggtagaatgcagcatagtgatgggatatcaattgtgatattaaattaaaaggactacagcaccactacacacctattagatctaggccagaatctggaagactgacaacaccaaatgctgatgaggctgtggggaaagaggaactcttatttattgttcgtgggaattaaaaatggtgtagccactttggaagacaattcgactattccttgcaaaactattcaatctagcagttgcactccttggtatgtaacccagaaagctgcatgtattacactcctcagtatgtaacccaaaaagctgtggtatgtctacacaaaaagctgcacacagatgtttatagtagctatattcataattgccaaaaattggaagcaaccaagatgtctttcagtaagcgaatgaataaataaactgtggtacatttagacaatggaataatatccagtgctaaaaagaaatgagctatcaagccacgaaaagacatggaggaaatgtaaatacaattactaattgaaagaagccaatcttaaaaggctacatgtatgattccaactatatgacattctggaaaatgcaaaactagggaagaagtaaagaagataagtggttgctaggggtcggggagggagagataaataggtggagtatagaggattttttagagcagtgagactactctgtacagtactataatggtggacacatgtcattatatatttgtccaaatccatggaatgtacaataccaagagtgaatcttaacgtagattacagactttgggtgataatggtatgccaatgtaggccttctgcttgattttgcggtgaacctaatattgctgtaaaaaacaaaatcaatttttaaaaaatgacagctttttattgggtattctgtctctatctcactctcttgtcctggggagtgagcttggaaccaaatttcccccagttgaaccagaatatcctgcagttacatataactaatatacatgatatatctacatatctttttctacccttctgttttcagattatgttttctctttttaatccagactgacaatttctgcctctaactggattgtttagtccatttacatttaatgtaattactaatattacagggttgaatttaaatctaccatcttggtatatgatttctatctgtcccatctgattgttgttcacctgtgtctttcttcctgttttcccttggtgaatgcagtaatttttagtattccatttagtataagtgtacatatttttagtatttattttttatctcccctgttaacctcttctgtgtcttgtgtgagtttgtgtggtttttctaggaattgcaatatgcatccttgacatatctattgtctcatgaaggatgtaagatattccaaaagtgtaatttccttaaccgactttcctggcccttatgttcttgtcatgtattttatttctatgtataacactataatacatatattgttattagttttgctttagttagtagtgattttatttatttttattgtcttatttttaattttgatttttaaaataaaatttaccatctttactatgtttaagtgttagttgaatagtgttaagtatagtcacataagtcagtatacagttttaaacaatgtatataacaatatatattaaacataggaattttggactgaatgtttttatccctccctcccaatttctgtgttgaaatcctaacccccttatgatggtattaagaggtcggggctttgaaaggtcattaggtcatggaggtggagacttcatgaatgggattagtgcccttataaaaggaaccccatagagctctctagctctccttctgccatataaaggtacaatgagaagtcagctgtctgtggcccagaagagtcctcatcagaccctgaccaggctggcatcctaatctcagacttccagcctttagaattgtaggaaataaatttctgttgtttatgagcc

SEQ ID NO: 301 - DNA, 786 bp, Homo sapien
acaactctaacaaactgacctctacactcatatccagccacattcaaattcccttcattctaagaattccttcaacataattccttttacacattaccaggatccaatcaaggttcacatattacatttgattcttaggttttgctagtctattttattctgaaaccatctctccatggttttgtttttgattgtttattttcttgataatgactcttcagaaaagttcagaccatttgtcttttttttcaatcctgctccttcggtaaagaccatgtcttatagaatgtcctgcttctggatttgactgctagtgtcctctaacttcttcctctatcgcctgtattccttgcaaaggagaaactagatctaaaagtaatttgcgagctttaattaaagtacaacataatctgggaagtagtaatccattttctagatgttgactggattaaatgccaatttaggctgttggctctttagaagactgtctttggctttctaggactccatccccagggaggatcacctagggagggatttgtggttatatagagacagggagagaaacagacccattttccctcgctgtgaaaggatcaacactgaatttggaatttagtctggaagttgactatttttattctctggacttcaatttcctcatctacaaaatgaaataacaacagttttatttttgatggattattgggctcaaatgagataatagattagaattttttttttaagctctccatttctctcgagagttctgtagttcttggcaaa

SEQ ID NO: 302 - DNA, 1128 bp, Homo sapien
acaactctaacaaactgacctctacactcatatccagccacattcaaattcccttcattctaagaattccttcaacataattccttttacacattaccaggatccaatcaaggttcacatattacatttgattcttaggttttgctagtctattttattctgaaaccatctctccatggttttgtttttgattgtttattttcttgataatgactcttcagaaaagttcagaccatttgtcttttttttcaatcctgctccttcggtaaagaccatgtcttatagaatgtcctgcttctggatttgactgctagtgtcctctaacttcttcctctatcgcctgtattccttgcaaaggagaaactagatctaaaagtaatttgcgagctttaattaaagtacaacataatctgggaagtagtaatccattttctagatgttgactggattaaatgccaatttaggctgttggctctttagaagactgtctttggctttctaggactccatccccagggaggatcacctagggagggatttgtggttatatagagacagggagagaaacagacccattttccctcgctgtgaaaggatcaacactgaatttggaatttagtctggaagttgactatttttattctctggacttcaatttcctcatctacaaaatgaaataacaacagttttatttttgatggattattgggctcaaatgagataatagattagaattttttttttaagctctccatttctctcgagagttctgtagttcttggcaaatctttttgtttgtttgtttttgtttgtttttttgagacagggtctgtcactctgtcgcccaggctggagtgcagcgtcacagtcacatctcactgcagcttcaacctcctgggctcaggtgatcctcccgccccagccccccgagtagctggaactacaggtgtgcgccaccatgcctggccaatttttgtgtttttttgcagagacaagggtttgccatgttacacatgcagctcttgaactcctgggctcaagcatctgcctgcctcagcttcatcaacgtgctgggattacacgcatgagccaccaggcccagccctagaaaattctttctatgtaaac

SEQ ID NO: 303 - DNA, 432 bp, Homo sapien
ctggaaattgctttttttgttttaagtaagggtggctcagtagatgctaacagagaagctgggatcagctaatctggagaagattctgagagaatgagttggggaagctcacactgagaaaatgagaagattggtaggaagggcggtttcttgctgtgtccaagaacaggaattgagaaatggtattaagctgaaggtgagaggggaacaaagaagactttgaaagttgcatacaggtttgaaacaaagtataccacaaggaatgggaacatgtagagctgttttaaaaatgtttctgtgtttgtgtgagtctgtgtactagatatatttttaaaatgacttttctcggaattacatcatactttgaagatcagcataggaagtaatatgaatgggctcactatagccaagtgcacttagttcccttgatct

SEQ ID NO: 304 - DNA, 431 bp, Homo sapien
ctggaaattgctttttttgttttaagtaagggtggctcagtagatgctaacagagaagctgggatcagctaatctggagaagattctgagagaatgagttggggaagctcacactgagaaaatgagaagattggtaggaagggcggtttcttgctgtgtccaagaacaggaattgagaaatggtattaagctgaaggtgagaggggaacaaagaagactttgaaagttgcatacaggtttgaaacaaagtataccacaaggaatgggaacatgtagagctgttttaaaaatgtttctgtgtttgtgtgagtctgtgtactagatatatttttaaaatgacttttctcggaattacatcatactttgaagatcagcataggaataatatgaatgggctcactatagccaagtgcacttagttcccttgatct

SEQ ID NO: 305 - DNA, 382 bp, Homo sapien
caaatttcatatttaagcacttagacattagaaggacgttattttgggaaaaaaacctactatctaatattttggtgttacagtagagcaaatctttttctttattgggatgaaatactaaaaattaaggatattctgatacatacaattgaacaaagagattccaatttgtcatacgggtattttccaactgttattacatgatcattacagaaagtaatgctactggaatattcccatttatatatgtggaaatatatggtaaataataattctgttaacatttaatattccagtgtgcacaattgctttatagtgaggaaattattttaaactatatgtgtttttaaaatcagcagagctaacaacattatacctaggg

SEQ ID NO: 306 - DNA, 452 bp, Homo sapien
caaatttcatatttaagcacttagacattagaaggacgttattttgggaaaaaaacctactatctaatattttggtgttacagtagagcaaatctttttctttattgggatgaaatactaaaaattaaggatattctgatacatacaattgaacaaagagattccaatttgtcatacgggtattttccaactgttattacatgatcattacagaaagtaatgctactggaatattcccatttatatatgtggaaatatatggtaaataataattctgttaacatttaatattccagtgtgcacaattgctttatagtgaggaaattatttaaactatatgtgkttttaaaatcagcagagctaacaacattatacctaggggctgttccaataattaataaaatggggctggggcatgggtggctccacggcctgtaatccccagcactttg

SEQ ID NO: 307 - DNA, 708 bp, Homo sapien
cttcatcagtgccgtgagcatccacaatgcttacgctggttgccacaggagcctgtcatgaaacgaaattttaaaggcagagtgatggatcgccaagagcctgtttacagaagaaatttgtgtcgaaagcaggaatgactgcaagaatgagcacttcagaatttcaagccctcaggaaataaacactaatgatccagtagctaggtgtaccagtgactgctgcctgactcattactgatgtcctaggtgaaataaatgtagtcagtctaggacagcagtgaatgagaagaaaatgaactgcacacaggccattgctgaagatgggattgtctcatatccttataatttagaaaacagtccatggagacaaaaccctgatcttttaagaaaattgggtttgttggattccagacaaaggattgtttttccaaattactgttttctttaggtggtagcctctacgcattttaaatattacttatgcaatttatagtaatctaattctagtgcagtgtgcttaaggaatccttgatgaggcctggttccaccgatgctcacactcagccttttcctacgtgcaggtggcacgcgtggccttgacagtctcctccatcttaaccacagtgcgatggctcacttgtgtgttaaagaaattgtaggtccctcctttcagccggctccagagtaatccttaggaaatactggtgt

SEQ ID NO: 308 - DNA, 702 bp, Homo sapien
cttcatcagtgccgtgagcatccacatgcttagctggttgcacaggagcctgtcatgaaacaaattttaaaggcagagtgatggatcccaagagcctgtttacagaagaaatttgtgtcgaaagcaggaatgactgcaagaatgagcacttcagaatttcaagccctcaggaaaaaacactaatgatccagtagctaggtgtaccagtgactgctgcctgactcattactgatgtcctaggtgaaataaatgtagtcagtctaggacagcagtgaatgagaagaaaatgaactgcacacaggccattgctgaagatgggattgtctcatatccttataatttagaaaacagtccatggagacaaaaccctgatcttttaagaaaattgggtttgttggattccagacaaaggattgtttttccaaattactgttttctttaggtggtagcctctacgcattttaaatattacttatgcaatttatagtaatctaattctagtgcagtgtgcttaaggaatccttgatgaggcctggttccaccgatgctcacactcagccttttcctacgtgcaggtggcacgcgtggccttgacagtctcctccatcttaaccacagtgcgatggctcacttgtgtgttaaagaaattgtaggtccctcctttcagccggctccagagtaatccttaggaaatactggtgt

SEQ ID NO: 309 - DNA, 816 bp, Homo sapien
gccaggattatgaagcggtttgtaattggtggcacatcacgtgatctgactttaaacatactttaggtgactgtccacatcaagtgtggatggcactggcatccatgcaggaagaattgcaaattgcatggctcatacataaatatcgaacggggaagggtctgcgagacataggacaaactagaggaaagaattgcttatagaaagaatcaaacctgaagttacttgttagcagctctaacaaagccatttgattgaataagggatatttgtgacattttattctaaaaatatggtttcctcttggatttgtgtcaaaggtgggaagatttttaaatagcactcctcaacatgaataggaacaggcatcttaaatgtacaataatttggtggcatatatgaaggtgtttttatatgagctaacgcccattttttattagggaggatcagggggttcttgactaccttataaagaaggcagatctgggtaagaaactagagtgtgtcccttgtgggctccttgtttctgcgtgtccctttcatgctggttttacaagattttgctctcagccactgtccctcaatttcttcactgtctctgtggaccatctggccactctcatggactcaggcaccccataaataataataacttcgaaacctgtagctcatgcctcaggttcccctctgtaccccagtattcagattttatctccatgccccacaaatttctctttctctacatagctaaactgatactatcaacttcttcttaaactgctcctgtgttctccgtggtattcagtgatgctacca

SEQ ID NO: 310 - DNA, 4302 bp, Homo sapien
cgcagtccttagcttcccggggacaggaaaccttcaagaccgagctgccacggccgcctccccgcccgccccccattctacgcgcctgcccacaccctcctcccctccttccagcgcctttcggtggagcactgcggcactcagcccgagctgccgttttcccctcgcggggaacgctgtgacccccccgcaggagcggcggggcggggtgggggggcccgggagaagatggcgacgccgggaagcgaaccccaacctttcgtcccggccctttcggtagctactctgcacccacttcatcatccccaccaccaccaccaccaccatcagcaccacggaggaaccggcgcccccggcggggcgggtggtggcggcggtggcagcgggggcttcaacctgcccttgaaccggggtctggagcgcgcgcttgaggaggcggccaactccggggggctgaacctgagcgccaggaaattgaaggaatttccccgtaccgcagcccccgggcacgacctctcggacacggtgcaggcagacttatctaaaaacagactggttgaagttccaatggaattgtgccattttgtatcactggaaattcttaatctgtatcacaactgtatcagagtcattcctgaggccatcgttaatctgcagatgctgacttacctgaacttgagtcgaaatcagctgtccgccctgcctgcctgcctgtgtggtctgcctctcaaagtcttaatcgcaagtaacaacaaacttggatcattaccagaagagataggtcagctcaaacagttaatggagctggatgtcagctgcaacgagatcacagcgttgccccagcagataggtcagttgaaatctctacgagaactgaatgtcagaagaaattaccttaaagttttaccacaagaactagtagatcttcccttggtaaagtttgacttttcctgcaacaaagtgctcgtgattccaatttgttttagagagatgaagcagctgcaagtgttactacttgagaataaccctctgcagtctcctccagcacagatttgcacaaagggcaaagttcacatatttaagtatctgagcatacaagcatgccagattaagacagctgactccctttatctccacaccatggagaggccacatttacaccagcacgtggaagatggcaagaaggattctgattcgggagttggaagtgataatggagataagcgattatctgccaccgagccttctgacgaagacactgttagcctcaatgtgccaatgtcaaacatcatggaagaagaacagatcatcaaggaggactcgtgccatcgccttagccccgttaaaggggaatttcatcaggaatttcaaccggagccttcccttttgggtgacagcaccaactcaggagaagaaagagaccagtttactgatagagcagatggtctccattcggaatttatgaactataaggcaagggcagaagactgtgaagagctgttacggatagaagaggatgtgcactggcaaactgagggcataataagttcatccaaagatcaggacatggatatagcaatgatcgagcagctgagagaagcagtagatttgctgcaagatcccaatggattaagcacagatattacagagagaagtgttttaaacctatatcctatgggatcagcagaagccttagaattacaagattctgcactgaatggtcaaatacagctggagacatctccggtgtgtgaggtgcaaagtgatctaacattacagagtaacgggagccagtattctccaaatgagattagagagaactcccctgcagtctctcctaccacaaacagcacagctccatttggcctgaagcctcgatcagtgtttctaagacctcagagaaatttggaatctatagacccgcagtttacaatccggaggaaaatggagcagatgagagaagagaaagagctggtggaacaacttcgtgagagcattgagatgagattgaaggtcagtctacacgaagacctgggggcagccctcatggatggtgtcgtcctctgccatctggtcaaccacatccgcccacggtcggttgcaagcatccatgtcccatcaccagcggttcccaaacttagcatggccaaatgcagaagaaatgtggaaaactttttggaagcgtgccgaaaattaggagtaccagaggctgacctctgctctccgtgtgacatcctgcagttggattttcgtcacattcgaaagactgttgacactctgctggcactcggggagaaagccccaccaccaacttctgccctccgctccagggaccttataggcttctgtcttgtccatattctctttatagtgctggtctatatcacttaccactggaatgctctgtccgcataacgtctgcacgtgcatccaaacgctgtgctctgtcgccctcaacctttgcagggtccttcctacctttgagcctttgccttgcaaacttccatccctgtcatgtcttcagttatctctcgagttttgaagctgaacagtagcaaatcagattttccagaagcacaaactttgtagaatacagtttagtataattcctctcacttactgaaatacaacgacgacgactgcaaagtgtatgcacaccgcatgcttcctcatccacatagtgccagcagcagtgccacgcagttcctcctctccctcccggtgagctgctgccctgggcagaggggaggagaattccaggacaagagtgtcaaggacagggatttagcatatggaagtctttcctttgggtcagtattgaactagaattctaattcgggactgggcaattgagctgtataggggccaccttgcagggaggacagaaaactaacattttggcccaacttgatctatacaaaactttaataataccactactgaccaagttggacgtgtacacgtactcacactgccttgatggccattcgattggattcctcccaaatttcctaaaaagggagccgcgaagggcgctgggcagtgtggccgccaacttccaccccggcaagcccctctgtcctatgcagaagggcgctcmagggaaggaagtgtcgttgctgttagagcctcacgtggaggagtcacttaaacaccagttttttactgcttaattccttgttaggtcttctcttgaggctcttagaaaagcgttttccagagagatttctatttttgaacaatggaacggatcactgcttttttgccacatcacatagtaactgccggtccagaatgtgacggattcgactctattcattttcaaataaagccatgagccgtggaacattcttggtcctggtgcttgggttatgatggcaggagtcaagaagaagattactttcattctagaagaatgtagtttctctaattatttgaaatgttcatttagcctttgattttcactgatattaactagcaaactgctttaagtcagctcaaaggattatatagtaactatatctgcatttggagcaatgtgatcagtttgcatttaaaaggaaaaaaaagaattttatcttagccagaatgtccctggattcaggggtgtctttgtataatatgagagggccttgttccaaggtcaaggcagcctccttattttacatgctgtttgccaaatcttgtttcttagcttggggagatgatggacttagcttcctcaagataaatttctagtttattaagatgcaaacagctctcatagatggctactacgaagaaaatcttatttttctgaacattttcatgaatccaggggacttgaaaatatggaagacccacatagttagaagaatatatttataaagattccttgctgctaagtcagatcagatttgctaacaggaagcattctttacatgacagtatcttgagttatgtgagttttttttcctcctgactttgtgttgattggtgaaatgcagggtatgtggaagttatctaattaacctcagttgtatatgaataacccacagatgtactgaattacttttggtgctatcttgtactcttcaatctgtaacacaataaaatccctttgtacgatgtctaatgagcaccctgagccataaattgcttaataaacacattttgggtgattattccaagtttttatcagcccattgatacatgtattcatgagctctcagcattcccatccagctctgcagtgcattgaggcttctctttaatggtcaccactgtggtggtttttcccttctttctggggagaaaatggga

SEQ ID NO: 311 - DNA, 2178 bp, Homo sapien
gggtagagtttaaggagaggaaagtaaacttagactttgggcatttttgggtttggccctgtagccaggaggctatgttgagcaagacaccgtggctgtgggggatcagctctgtgtgagccacacggaaaggggaggccaggattatgaagcggtttgtaattggtggcacatcacgtgatctgactttaaacatactttaggtgactgtccacatcaagtgtggatggcactggcatccatgcaggaagaattgcaaattgcatggctcatacataaatatcgaacggggaagggtctgcgagacgataggacaaactagaggaaagaattgcttatagaaagaatcaaacctgaagttacttgttagcagctctaacaaagccatttgattgaatagggatatttgtgacattttattctaaaaatatggtttcctcttggatttgtgtcaaaggtgggaagatttttaaatagcactcctcaacaatgaataggaacaggcatcttaaatgtacaataatttggtggcatatatgaaggtgtttttatatgagctaacgcccaattttttattagggaggatcagggggttcttgactaccttataaagaaggcagatctgggtaagaaactagagtgtgtcccttgtgggctccttgtttctgcgtgtccctttcatgctggttttacaagattttgctctcagccactgtccctcaatttcttcactgtctctgtggaccatctggccactctcatggactcaggcaccccataaataataataacttcgaaacctgtagctcatgcctcaggttcccctctgtaccccagtattcagattttatctccatgccccacaaatttctctttctctacatagctaaactgatactatcaacttcttcttaaactgctcctgtgttctccgtggtattcagtgatgctaccatctacccagtcattcctgctggaaatcgggatgtcatcttgacttttctccatgaccagttataaatcctgcacattttatgacagaaaaaattcataattttttctcttaaccagtagttgccaaagtaatctgatgttgaactgacaacatgagatttgcccagttaatttggggtccagacgtgtatttattgaatgctcccaatgtgattctgcatatttaggaagtactaccttgaaccatttctaaaaatcataattaaaatgaggatgggaaccagcaggcagcttggtcacctagcaaggtaagctgacatccacagatattttggagtgaactccttgctctgggaaattctttatcttagtttgtataatactttaaacgtatttttctatgaatacagctgcatgttttcagaacgtatgagtatggtctacttagttactgaacacactaactaattaattcaacagatattcattgtgcacctatggaccggggacatgatggcagtaagaaagatgaatttcttgcctcaacagtttcacagtctaatggaacataccatgctttgttcttcttttttaaggtgcaaagtgatctaacattacagagtaacgggagccagtattctccaaatgaggtaagtttcttgaagattaatggaaggtgaggtgtttcttgatggctggattggaatatcttttacagaaatatataatctaagacttgtgattaattaattaattgagtctttgggggaatccgtctaactctcattagctatcatagctttatctggtcctattcgtaattaaagattaatttttatgagatatatttttaaaaaccgaatgtaggaacatctttacaagaaaacagaatgaagatcacttaaataggaaacatttagaatgtcttgttctccataaatgattcagtgtgtgattcagtattactgagttcagtattatctgtttcctcatcagatgtgccctcttttggatataaatggatatagtgtgtgtgtgtgcatgcacccatgcacacagctgtgcaagaggagtgccagtgtcacgtaattgtaaaatgttcttaaaatggacaaaacaaattgagtgggtcactctaaaacaaacattctgttggttatgccatttaacatctttacaaagtgattttttttggccaggacttcatcacacagcagcgaatgc

SEQ ID NO: 312 - DNA, 378 bp, Homo sapien
cctgtcaaagaaaagaaaaaagaaaaagtaaacattgggctgtggaaaacacactgtcatcaagtagataaaagaatatttgccgtggtgtctttttccagccaaggagacacaccctggaagaagattctcttgaatgatatcagaccagggtgaaataacaaaggtggaaaattatttcattgtgttattctgtaaactggtttgtggagcatgaaaggttctgcacacaaggagggactcacgcttactgtttttcttaaatagtatgtcctggacatttcccaagagcaaaaatgcagcatgagagagtagcaggacatatgtgtctttgacagttttatgaaagagtcttgaaagggaggctattgagggcac

SEQ ID NO: 313 - DNA, 4586 bp, Homo sapien
cgcagtccttagcttcccggggacaggaaaccttcaagaccgagctgccacggccgcctccccgcccgccccccattctacgcgcctgcccacaccctcctcccctccttccagcgcctttcggtggagcactgcggcactcagcccgagctgccgttttcccctcgcggggaacgctgtgacccccccgcaggagcggcggggcggggtgggggggcccgggagaagatggcgacgccgggaagcgaaccccaacctttcgtcccggccctttcggtagctactctgcacccacttcatcatccccaccaccaccaccaccaccatcagcaccacggaggaaccggcgcccccggcggggcgggtggtggcggcggtggcagcgggggcttcaacctgcccttgaaccggggtctggagcgcgcgcttgaggaggcggccaactccggggggctgaacctgagcgccaggaaattgaaggaatttccccgtaccgcagcccccgggcacgacctctcggacacggtgcaggcagacttatctaaaaacagactggttgaagttccaatggaattgtgccattttgtatcactggaaattcttaatctgtatcacaactgtatcagagtcattcctgaggccatcgttaatctgcagatgctgacttacctgaacttgaggatgtcagctgcaacgagatcacagcgttgccccagcagataggtcagttgaaatctctacgagaactgaatgtcagaagaaattaccttaaagttttaccacaagaactagtagatcttcccttggtaaagtttgacttttcctgcaacaaagtgctcgtgattccaatttgttttagagagatgaagcagctgcaagtgttactacttgagaataaccctctgcagtctcctccagcacagatttgcacaaagggcaaagttcacatatttaagtatctgagcatacaagcatgccagattaagacagctgactccctttatctccacaccatggagaggccacatttacaccagcacgtggaagatggcaagaaggattctgattcgggagttggaagtgataatggagataagcgattatctgccaccgagccttctgacgaagacactgttagcctcaatgtgccaatgtcaaacatcatggaagaagaacagatcatcaaggaggactcgtgccatcgccttagccccgttaaaggggaatttcatcaggaatttcaaccggagccttcccttttgggtgacagcaccaactcaggagaagaaagagaccagtttactgatagagcagatggtctccattcggaatttatgaactataaggcaagggcagaagactgtgaagagctgttacggatagaagaggatgtgcactggcaaactgagggcataataagttcatccaaagatcaggacatggatatagcaatgatcgagcagctgagagaagcagtagatttgctgcaagatcccaatggattaagcacagatattacagagagaagtgttttaaacctatatcctatgggatcagcagaagccttagaattacaagattctgcactgaatggtcaaatacagctggagacatctccggtgtgtgaggtgcaaagtgatctaacattacagagtaacgggagccagtattctccaaatgagattagagagaactcccctgcagtctctcctaccacaaacagcacagctccatttggcctgaagcctcgatcagtgtttctaagacctcagagaaatttggaatctatagacccgcagtttacaatccggaggaaaatggagcagatgagagaagagaaagagctggtggaacaacttcgtgagagcattgagatgagattgaaggtcagtctacacgaagacctgggggcagccctcatggatggtgtcgtcctctgccatctggtcaaccacatccgcccacggtcggttgcaagcatccatgtcccatcaccagcggttcccaaacttagcatggccaaatgcagaagaaatgtggaaaactttttggaagcgtgccgaaaattaggagtaccagaggaaaagctatgtctcccccaccacatccttgaagaaaaaggcctggtcaaagtgggcattaccattcaagcattactagacatcaccgtaacgaaggctctgttcacatgaaactaccccttctccattgggggctcagactctgctctcatccaggatcctgaactctgctccaggcacctgttcaaccctctctcccacccactgcctgtcacttcactgactccagttacattgaaacaattttcagtctaagggaggattttctacctttcagagctgacctccgactttaagacttgacaggtatttatcttgaaaccagagagggagctggaggaaaaaaaaactgagcagcacatcaatgccttttccaccctccttcatcctttccacactcaccgactgccattaccaaaacgccaagcacaaccgttttgcagcaagacgcattcgttttattaaaaccaaactcattatgtatttagtggggggaggggggcacaatcaggtttttcaccaccaaatttttcgagaggtttcttgagaccattgccttttaaaaaactattttcgacatacaaaatatttatataaatattatttattagtgagttgttattcatcctttggatgcaaattgtaaattaggaaactattttattactgcttttttgtggttaaacactttattttaatataaatattgagttattttctatcctctttggtgtgcggtagtttaggtctcagtaatgtttctggtatatatgattccaaaaaaaagcgaaaaacaggtgcttttaggacacaacttttctggggaggcaatattgacactttggtttgtggaacgttggtcttatttatatttctgcattccatccagtttcctacattccagcagccctctgtcccccaatataatgaactgactaaaatcaagagagcaccccaaagttatttgtaaatagctgtgatggaaaaaaaaaagacatattaaacttgaagctaaaatgtgaacaattattttttggattcatacttcttttgctatgcacaaaacattcacgttttaacacaaagaaataataagtgttagcatcgtgtgtcttgaagtatacttttgcactgtaacttgggttacgttaaagagagcttagcaccaaaggtagataatgaagaaatggcataggaaagtggagatgataaaaagttgattgttgaaccaaaaagggtttgaagggaagcttcgactgagtatcagaaattacttaaggcacataggacctgaatcaggaaaccagcacttcttacaactgccagttttaaaagaggaaatgattctgagatgtgctcattttattttaatttggtggttggtggttttccaagtagtctgtaaaatcctgcaagattcacagtctctggtgtgaaacctcagaagtgagtcgttgtgagcctgtgggcagcaccaccaaggcaggctaaggggagggtgcagtaagtggagtttgtgaggctgagtggctgaggagggagcaagtgcaacaaaatagggctagagaagaaccagccaaggagtggaacccatgctgctctcagagattcacggaacacggcagccttctgcaggcagttccatgcatgtgcactcacgctgcaatcacagatgtcccagtaattaacctttctaagtcttgtgaatgctgactgcactttcacctcctcgaaaagccattggaagtttttagagcagcagcagccacagtttgtaagacaaatgtagagggggacgcaaaagaaaagacaccaccaggaggaggattcagtgtgcagtcagcacagaccaacatcaaccaaggcaatggctgccctccactcttgggaagatggggggaggtttctgaaaacggaaatttggattggcagctagcagttatttcctatcagatgtactgtgcactttaacctaacttaaaatgtattttaatatttttctgtactgcacaaatacctgttttgtcaaatagcataatgatgtaaagaaacattttggacaaagagtgtatacaatttaagcaacattcaaaggttgactatataagtaggagtttagcctgctgcaccttcacgggcattcagaatgcggggtcctgaaatattttcttacgtgtatatatggtagcatgaagctttgtaatcattgttttgagagatttttttttcaaaattaaagtatttcttttgatattaatttttattattttcttgaagttggttgtgtaatgtaaatggcttcagtcttctgtaaaattgcttttttttcttttaaatgcagtccttctatggctaagacgtcttcaagatccttgtacactgtttatatgtgcaataaaatgcatggccagctgacagtatcgtcagtggacagaatgtatatagtgcaaatatccttccttttattatttaacagccattaaaaccttggatttgtacaaacca

SEQ ID NO: 314 - DNA, 4508 bp, Homo sapien
gggtagagtttaaggagaggaaagtaaacttagactttgggcatttttgggtttggccctgtagccaggaggctatgttgagcaagacaccgtggctgtgggggatcagctctgtgtgagccacacggaaaggggaggccaggattatgaagcggtttgtaattggtggcacatcacgtgatctgactttaaacatactttaggtgactgtccacatcaagtgtggatggcactggcatccatgcaggaagaattgcaaattgcatggctcatacataaatatcgaacggggaagggtctgcgagacgataggacaaactagaggaaagaattgcttatagaaagaatcaaacctgaagttacttgttagcagctctaacaaagccatttgattgaatagggatatttgtgacattttattctaaaaatatggtttcctcttggatttgtgtcaaaggtgggaagatttttaaatagcactcctcaacaatgaataggaacaggcatcttaaatgtacaataatttggtggcatatatgaaggtgtttttatatgagctaacgcccaattttttattagggaggatcagggggttcttgactaccttataaagaaggcagatctgggtaagaaactagagtgtgtcccttgtgggctccttgtttctgcgtgtccctttcatgctggttttacaagattttgctctcagccactgtccctcaatttcttcactgtctctgtggaccatctggccactctcatggactcaggcaccccataaataataataacttcgaaacctgtagctcatgcctcaggttcccctctgtaccccagtattcagattttatctccatgccccacaaatttctctttctctacatagctaaactgatactatcaacttcttcttaaactgctcctgtgttctccgtggtattcagtgatgctaccatctacccagtcattcctgctggaaatcgggatgtcatcttgacttttctccatgaccagttataaatcctgcacattttatgacagaaaaaattcataattttttctcttaaccagtagttgccaaagtaatctgatgttgaactgacaacatgagatttgcccagttaatttggggtccagacgtgtatttattgaatgctcccaatgtgattctgcatatttaggaagtactaccttgaaccatttctaaaaatcataattaaaatgaggatgggaaccagcaggcagcttggtcacctagcaaggtaagctgacatccacagatattttggagtgaactccttgctctgggaaattctttatcttagtttgtataatactttaaacgtatttttctatgaatacagctgcatgttttcagaacgtatgagtatggtctacttagttactgaacacactaactaattaattcaacagatattcattgtgcacctatggaccggggacatgatggcagtaagaaagatgaatttcttgcctcaacagtttcacagtctaatggaacataccatgctttgttcttcttttttaaggtgcaaagtgatctaacattacagagtaacgggagccagtattctccaaatgagattagagagaactcccctgcagtctctcctaccacaaacagcacagctccatttggcctgaagcctcgatcagtgtttctaagacctcagagaaatttggaatctatagacccgcagtttacaatccggaggaaaatggagcagatgagagaagagaaagagctggtggaacaacttcgtgagagcattgagatgagattgaaggtcagtctacacgaagacctgggggcagccctcatggatggtgtcgtcctctgccatctggtcaaccacatccgcccacggtcggttgcaagcatccatgtcccatcaccagcggttcccaaacttagcatggccaaatgcagaagaaatgtggaaaactttttggaagcgtgccgaaaattaggagtaccagaggaaaagctatgtctcccccaccacatccttgaagaaaaaggcctggtcaaagtgggcattaccattcaagcattactagacatcaccgtaacgaaggctctgttcacatgaaactaccccttctccattgggggctcagactctgctctcatccaggatcctgaactctgctccaggcacctgttcaaccctctctcccacccactgcctgtcacttcactgactccagttacattgaaacaattttcagtctaagggaggattttctacctttcagagctgacctccgactttaagacttgacaggtatttatcttgaaaccagagagggagctggaggaaaaaaaaactgagcagcacatcaatgccttttccaccctccttcatcctttccacactcaccgactgccattaccaaaacgccaagcacaaccgttttgcagcaagacgcattcgttttattaaaaccaaactcattatgtatttagtggggggaggggggcacaatcaggtttttcaccaccaaatttttcgagaggtttcttgagaccattgccttttaaaaaactattttcgacatacaaaatatttatataaatattatttattagtgagttgttattcatcctttggatgcaaattgtaaattaggaaactattttattactgcttttttgtggttaaacactttattttaatataaatattgagttattttctatcctctttggtgtgcggtagtttaggtctcagtaatgtttctggtatatatgattccaaaaaaaagcgaaaaacaggtgcttttaggacacaacttttctggggaggcaatattgacactttggtttgtggaacgttggtcttatttatatttctgcattccatccagtttcctacattccagcagccctctgtcccccaatataatgaactgactaaaatcaagagagcaccccaaagttatttgtaaatagctgtgatggaaaaaaaaaagacatattaaacttgaagctaaaatgtgaacaattattttttggattcatacttcttttgctatgcacaaaacattcacgttttaacacaaagaaataataagtgttagcatcgtgtgtcttgaagtatacttttgcactgtaacttgggttacgttaaagagagcttagcaccaaaggtagataatgaagaaatggcataggaaagtggagatgataaaaagttgattgttgaaccaaaaagggtttgaagggaagcttcgactgagtatcagaaattacttaaggcacataggacctgaatcaggaaaccagcacttcttacaactgccagttttaaaagaggaaatgattctgagatgtgctcattttattttaatttggtggttggtggttttccaagtagtctgtaaaatcctgcaagattcacagtctctggtgtgaaacctcagaagtgagtcgttgtgagcctgtgggcagcaccaccaaggcaggctaaggggagggtgcagtaagtggagtttgtgaggctgagtggctgaggagggagcaagtgcaacaaaatagggctagagaagaaccagccaaggagtggaacccatgctgctctcagagattcacggaacacggcagccttctgcaggcagttccatgcatgtgcactcacgctgcaatcacagatgtcccagtaattaacctttctaagtcttgtgaatgctgactgcactttcacctcctcgaaaagccattggaagtttttagagcagcagcagccacagtttgtaagacaaatgtagagggggacgcaaaagaaaagacaccaccaggaggaggattcagtgtgcagtcagcacagaccaacatcaaccaaggcaatggctgccctccactcttgggaagatggggggaggtttctgaaaacggaaatttggattggcagctagcagttatttcctatcagatgtactgtgcactttaacctaacttaaaatgtattttaatatttttctgtactgcacaaatacctgttttgtcaaatagcataatgatgtaaagaaacattttggacaaagagtgtatacaatttaagcaacattcaaaggttgactatataagtaggagtttagcctgctgcaccttcacgggcattcagaatgcggggtcctgaaatattttcttacgtgtatatatggtagcatgaagctttgtaatcattgttttgagagatttttttttcaaaattaaagtatttcttttgatattaatttttattattttcttgaagttggttgtgtaatgtaaatggcttcagtcttctgtaaaattgcttttttttcttttaaatgcagtccttctatggctaagacgtcttcaagatccttgtacactgtttatatgtgcaataaaatgcatggccagctgacagtatcgtcagtggacagaatgtatatagtgcaaatatccttccttttattatttaacagccattaaaaccttggatttgtacaaacca

SEQ ID NO: 315 - DNA, 4666 bp, Homo sapien
cgcagtccttagcttcccggggacaggaaaccttcaagaccgagctgccacggccgcctccccgcccgccccccattctacgcgcctgcccacaccctcctcccctccttccagcgcctttcggtggagcactgcggcactcagcccgagctgccgttttcccctcgcggggaacgctgtgacccccccgcaggagcggcggggcggggtgggggggcccgggagaagatggcgacgccgggaagcgaaccccaacctttcgtcccggccctttcggtagctactctgcacccacttcatcatccccaccaccaccaccaccaccatcagcaccacggaggaaccggcgcccccggcggggcgggtggtggcggcggtggcagcgggggcttcaacctgcccttgaaccggggtctggagcgcgcgcttgaggaggcggccaactccggggggctgaacctgagcgccaggaaattgaaggaatttccccgtaccgcagcccccgggcacgacctctcggacacggtgcaggcagacttatctaaaaacagactggttgaagttccaatggaattgtgccattttgtatcactggaaattcttaatctgtatcacaactgtatcagagtcattcctgaggccatcgttaatctgcagatgctgacttacctgaacttgagtcgaaatcagctgtccgccctgcctgcctgcctgtgtggtctgcctctcaaagtcttaatcgcaagtaacaacaaacttggatcattaccagaagagataggtcagctcaaacagttaatggagctggatgtcagctgcaacgagatcacagcgttgccccagcagataggtcagttgaaatctctacgagaactgaatgtcagaagaaattaccttaaagttttaccacaagaactagtagatcttcccttggtaaagtttgacttttcctgcaacaaagtgctcgtgattccaatttgttttagagagatgaagcagctgcaagtgttactacttgagaataaccctctgcagtctcctccagcacagatttgcacaaagggcaaagttcacatatttaagtatctgagcatacaagcatgccagattaagacagctgactccctttatctccacaccatggagaggccacatttacaccagcacgtggaagatggcaagaaggattctgattcgggagttggaagtgataatggagataagcgattatctgccaccgagccttctgacgaagacactgttagcctcaatgtgccaatgtcaaacatcatggaagaagaacagatcatcaaggaggactcgtgccatcgccttagccccgttaaaggggaatttcatcaggaatttcaaccggagccttcccttttgggtgacagcaccaactcaggagaagaaagagaccagtttactgatagagcagatggtctccattcggaatttatgaactataaggcaagggcagaagactgtgaagagctgttacggatagaagaggatgtgcactggcaaactgagggcataataagttcatccaaagatcaggacatggatatagcaatgatcgagcagctgagagaagcagtagatttgctgcaagatcccaatggattaagcacagatattacagagagaagtgttttaaacctatatcctatgggatcagcagaagccttagaattacaagattctgcactgaatggtcaaatacagctggagacatctccggtgtgtgaggtgcaaagtgatctaacattacagagtaacgggagccagtattctccaaatgagattagagagaactcccctgcagtctctcctaccacaaacagcacagctccatttggcctgaagcctcgatcagtgtttctaagacctcagagaaatttggaatctatagacccgcagtttacaatccggaggaaaatggagcagatgagagaagagaaagagctggtggaacaacttcgtgagagcattgagatgagattgaaggtcagtctacacgaagacctgggggcagccctcatggatggtgtcgtcctctgccatctggtcaaccacatccgcccacggtcggttgcaagcatccatgtcccatcaccagcggttcccaaacttagcatggccaaatgcagaagaaatgtggaaaactttttggaagcgtgccgaaaattaggagtaccagaggaaaagctatgtctcccccaccacatccttgaagaaaaaggcctggtcaaagtgggcattaccattcaagcattactagacatcaccgtaacgaaggctctgttcacatgaaactaccccttctccattgggggctcagactctgctctcatccaggatcctgaactctgctccaggcacctgttcaaccctctctcccacccactgcctgtcacttcactgactccagttacattgaaacaattttcagtctaagggaggattttctacctttcagagctgacctccgactttaagacttgacaggtatttatcttgaaaccagagagggagctggaggaaaaaaaaactgagcagcacatcaatgccaaaacgccaagcacaaccgttttgcagcaagacgcattcgttttattaaaaccaaactcattatgtatttagtggggggaggggggcacaatcaggtttttcaccaccaaatttttcgagaggtttcttgagaccattgccttttaaaaaactattttcgacatacaaaatatttatataaatattatttattagtgagttgttattcatcctttggatgcaaattgtaaattaggaaactattttattactgcttttttgtggttaaacactttattttaatataaatattgagttattttctatcctctttggtgtgcggtagtttaggtctcagtaatgtttctggtatatatgattccaaaaaaaagcgaaaaacaggtgcttttaggacacaacttttctggggaggcaatattgacactttggtttgtggaacgttggtcttatttatatttctgcattccatccagtttcctacattccagcagccctctgtcccccaatataatgaactgactaaaatcaagagagcaccccaaagttatttgtaaatagctgtgatggaaaaaaaaaagacatattaaacttgaagctaaaatgtgaacaattattttttggattcatacttcttttgctatgcacaaaacattcacgttttaacacaaagaaataataagtgttagcatcgtgtgtcttgaagtatacttttgcactgtaacttgggttacgttaaagagagcttagcaccaaaggtagataatgaagaaatggcataggaaagtggagatgataaaaagttgattgttgaaccaaaaagggtttgaagggaagcttcgactgagtatcagaaattacttaaggcacataggacctgaatcaggaaaccagcacttcttacaactgccagttttaaaagaggaaatgattctgagatgtgctcattttattttaatttggtggttggtggttttccaagtagtctgtaaaatcctgcaagattcacagtctctggtgtgaaacctcagaagtgagtcgttgtgagcctgtgggcagcaccaccaaggcaggctaaggggagggtgcagtaagtggagtttgtgaggctgagtggctgaggagggagcaagtgcaacaaaatagggctagagaagaaccagccaaggagtggaacccatgctgctctcagagattcacggaacacggcagccttctgcaggcagttccatgcatgtgcactcacgctgcaatcacagatgtcccagtaattaacctttctaagtcttgtgaatgctgactgcactttcacctcctcgaaaagccattggaagtttttagagcagcagcagccacagtttgtaagacaaatgtagagggggacgcaaaagaaaagacaccaccaggaggaggattcagtgtgcagtcagcacagaccaacatcaaccaaggcaatggctgccctccactcttgggaagatggggggaggtttctgaaaacggaaatttggattggcagctagcagttatttcctatcagatgtactgtgcactttaacctaacttaaaatgtattttaatatttttctgtactgcacaaatacctgttttgtcaaatagcataatgatgtaaagaaacattttggacaaagagtgtatacaatttaagcaacattcaaaggttgactatataagtaggagtttagcctgctgcaccttcacgggcattcagaatgcggggtcctgaaatattttcttacgtgtatatatggtagcatgaagctttgtaatcattgttttgagagatttttttttcaaaattaaagtatttcttttgatattaatttttattattttcttgaagttggttgtgtaatgtaaatggcttcagtcttctgtaaaattgcttttttttcttttaaatgcagtccttctatggctaagacgtcttcaagatccttgtacactgtttatatgtgcaataaaatgcatggccagctgacagtatcgtcagtggacagaatgtatatagtgcaaatatccttccttttattatttaacagccattaaaaccttggatttgtacaaacca

SEQ ID NO: 316 - DNA, 2603 bp, Homo sapien
tgcgtctttcaactgcggttcccaaacttagcatggccaaatgcagaagaaatgtggaaaactttttggaagcgtgccgaaaattaggagtaccagaggaaaagctatgtctcccccaccacatccttgaagaaaaaggcctggtcaaagtgggcattaccattcaagcattactagacatcaccgtaacgaaggctctgttcacatgaaactaccccttctccattgggggctcagactctgctctcatccaggatcctgaactctgctccaggcacctgttcaaccctctctcccacccactgcctgtcacttcactgactccagttacattgaaacaattttcagtctaagggaggattttctacctttcagagctgacctccgactttaagacttgacaggtatttatcttgaaaccagagagggagctggaggaaaaaaaaactgagcagcacatcaatgccttttccaccctccttcatcctttccacactcaccgactgccattaccaaaacgccaagcacaaccgttttgcagcaagacgcattcgttttattaaaaccaaactcattatgtatttagtggggggaggggggcacaatcaggtttttcaccaccaaatttttcgagaggtttcttgagaccattgccttttaaaaaactattttcgacatacaaaatatttatataaatattatttattagtgagttgttattcatcctttggatgcaaattgtaaattaggaaactattttattactgcttttttgtggttaaacactttattttaatataaatattgagttattttctatcctctttggtgtgcggtagtttaggtctcagtaatgtttctggtatatatgattccaaaaaaaagcgaaaaacaggtgcttttaggacacaacttttctggggaggcaatattgacactttggtttgtggaacgttggtcttatttatatttctgcattccatccagtttcctacattccagcagccctctgtcccccaatataatgaactgactaaaatcaagagagcaccccaaagttatttgtaaatagctgtgatggaaaaaaaaaagacatattaaacttgaagctaaaatgtgaacaattattttttggattcatacttcttttgctatgcacaaaacattcacgttttaacacaaagaaataataagtgttagcatcgtgtgtcttgaagtatacttttgcactgtaacttgggttacgttaaagagagcttagcaccaaaggtagataatgaagaaatggcataggaaagtggagatgataaaaagttgattgttgaaccaaaaagggtttgaagggaagcttcgactgagtatcagaaattacttaaggcacataggacctgaatcaggaaaccagcacttcttacaactgccagttttaaaagaggaaatgattctgagatgtgctcattttattttaatttggtggttggtggttttccaagtagtctgtaaaatcctgcaagattcacagtctctggtgtgaaacctcagaagtgagtcgttgtgagcctgtgggcagcaccaccaaggcaggctaaggggagggtgcagtaagtggagtttgtgaggctgagtggctgaggagggagcaagtgcaacaaaatagggctagagaagaaccagccaaggagtggaacccatgctgctctcagagattcacggaacacggcagccttctgcaggcagttccatgcatgtgcactcacgctgcaatcacagatgtcccagtaattaacctttctaagtcttgtgaatgctgactgcactttcacctcctcgaaaagccattggaagtttttagagcagcagcagccacagtttgtaagacaaatgtagagggggacgcaaaagaaaagacaccaccaggaggaggattcagtgtgcagtcagcacagaccaacatcaaccaaggcaatggctgccctccactcttgggaagatggggggaggtttctgaaaacggaaatttggattggcagctagcagttatttcctatcagatgtactgtgcactttaacctaacttaaaatgtattttaatatttttctgtactgcacaaatacctgttttgtcaaatagcataatgatgtaaagaaacattttggacaaagagtgtatacaatttaagcaacattcaaaggttgactatataagtaggagtttagcctgctgcaccttcacgggcattcagaatgcggggtcctgaaatattttcttacgtgtatatatggtagcatgaagctttgtaatcattgttttgagagatttttttttcaaaattaaagtatttcttttgatattaatttttattattttcttgaagttggttgtgtaatgtaaatggcttcagtcttctgtaaaattgcttttttttcttttaaatgcagtccttctatggctaagacgtcttcaagatccttgtacactgtttatatgtgcaataaaatgcatggccagctgacagtatcgtcagtggacagaatgtatatagtgcaaatatccttccttttattatttaacagccattaaaaccttggatttgtacaaacca

SEQ ID NO: 317 - DNA, 2671 bp, Homo sapien
cctgtcaaagaaaagaaaaaagaaaaagtaaacattgggctgtggaaaacacactgtcatcaagtagataaaagaatatttgccgtggtgtctttttccagccaaggagacacaccctggaagaagattctcttgaatgatatcagaccagggtgaaataacaaaggaaaagctatgtctcccccaccacatccttgaagaaaaaggcctggtcaaagtgggcattaccattcaagcattactagacatcaccgtaacgaaggctctgttcacatgaaactaccccttctccattgggggctcagactctgctctcatccaggatcctgaactctgctccaggcacctgttcaaccctctctcccacccactgcctgtcacttcactgactccagttacattgaaacaattttcagtctaagggaggattttctacctttcagagctgacctccgactttaagacttgacaggtatttatcttgaaaccagagagggagctggaggaaaaaaaaactgagcagcacatcaatgccttttccaccctccttcatcctttccacactcaccgactgccattaccaaaacgccaagcacaaccgttttgcagcaagacgcattcgttttattaaaaccaaactcattatgtatttagtggggggaggggggcacaatcaggtttttcaccaccaaatttttcgagaggtttcttgagaccattgccttttaaaaaactattttcgacatacaaaatatttatataaatattatttattagtgagttgttattcatcctttggatgcaaattgtaaattaggaaactattttattactgcttttttgtggttaaacactttattttaatataaatattgagttattttctatcctctttggtgtgcggtagtttaggtctcagtaatgtttctggtatatatgattccaaaaaaaagcgaaaaacaggtgcttttaggacacaacttttctggggaggcaatattgacactttggtttgtggaacgttggtcttatttatatttctgcattccatccagtttcctacattccagcagccctctgtcccccaatataatgaactgactaaaatcaagagagcaccccaaagttatttgtaaatagctgtgatggaaaaaaaaaagacatattaaacttgaagctaaaatgtgaacaattattttttggattcatacttcttttgctatgcacaaaacattcacgttttaacacaaagaaataataagtgttagcatcgtgtgtcttgaagtatacttttgcactgtaacttgggttacgttaaagagagcttagcaccaaaggtagataatgaagaaatggcataggaaagtggagatgataaaaagttgattgttgaaccaaaaagggtttgaagggaagcttcgactgagtatcagaaattacttaaggcacataggacctgaatcaggaaaccagcacttcttacaactgccagttttaaaagaggaaatgattctgagatgtgctcattttattttaatttggtggttggtggttttccaagtagtctgtaaaatcctgcaagattcacagtctctggtgtgaaacctcagaagtgagtcgttgtgagcctgtgggcagcaccaccaaggcaggctaaggggagggtgcagtaagtggagtttgtgaggctgagtggctgaggagggagcaagtgcaacaaaatagggctagagaagaaccagccaaggagtggaacccatgctgctctcagagattcacggaacacggcagccttctgcaggcagttccatgcatgtgcactcacgctgcaatcacagatgtcccagtaattaacctttctaagtcttgtgaatgctgactgcactttcacctcctcgaaaagccattggaagtttttagagcagcagcagccacagtttgtaagacaaatgtagagggggacgcaaaagaaaagacaccaccaggaggaggattcagtgtgcagtcagcacagaccaacatcaaccaaggcaatggctgccctccactcttgggaagatggggggaggtttctgaaaacggaaatttggattggcagctagcagttatttcctatcagatgtactgtgcactttaacctaacttaaaatgtattttaatatttttctgtactgcacaaatacctgttttgtcaaatagcataatgatgtaaagaaacattttggacaaagagtgtatacaatttaagcaacattcaaaggttgactatataagtaggagtttagcctgctgcaccttcacgggcattcagaatgcggggtcctgaaatattttcttacgtgtatatatggtagcatgaagctttgtaatcattgttttgagagatttttttttcaaaattaaagtatttcttttgatattaatttttattattttcttgaagttggttgtgtaatgtaaatggcttcagtcttctgtaaaattgcttttttttcttttaaatgcagtccttctatggctaagacgtcttcaagatccttgtacactgtttatatgtgcaataaaatgcatggccagctgacagtatcgtcagtggacagaatgtatatagtgcaaatatccttccttttattatttaacagccattaaaaccttggatttgtacaaacca

SEQ ID NO: 318 - DNA, 2591 bp, Homo sapien
ctagaggatcccgtgtcatcccccttcgtgtgtgtcatcccccttcgtgtgtcatccgaagcagtgcgaaaattaggagtacagaggaaaagctatgtctcccccaccacatccttgaagaaaaaggcctggtcaaagtgggcattaccattcaagcattactagacatcaccgtaacgaaggctctgttcacatgaaactaccccttctccattgggggctcagactctgctctcatccaggatcctgaactctgctccaggcacctgttcaaccctctctcccacccactgcctgtcacttcactgactccagttacattgaaacaattttcagtctaagggaggattttctacctttcagagctgacctccgactttaagacttgacaggtatttatcttgaaaccagagagggagctggaggaaaaaaaaactgagcagcacatcaatgccttttccaccctccttcatcctttccacactcaccgactgccattaccaaaacgccaagcacaaccgttttgcagcaagacgcattcgttttattaaaaccaaactcattatgtatttagtggggggaggggggcacaatcaggtttttcaccaccaaatttttcgagaggtttcttgagaccattgccttttaaaaaactattttcgacatacaaaatatttatataaatattatttattagtgagttgttattcatcctttggatgcaaattgtaaattaggaaactattttattactgcttttttgtggttaaacactttattttaatataaatattgagttattttctatcctctttggtgtgcggtagtttaggtctcagtaatgtttctggtatatatgattccaaaaaaaagcgaaaaacaggtgcttttaggacacaacttttctggggaggcaatattgacactttggtttgtggaacgttggtcttatttatatttctgcattccatccagtttcctacattccagcagccctctgtcccccaatataatgaactgactaaaatcaagagagcaccccaaagttatttgtaaatagctgtgatggaaaaaaaaaagacatattaaacttgaagctaaaatgtgaacaattattttttggattcatacttcttttgctatgcacaaaacattcacgttttaacacaaagaaataataagtgttagcatcgtgtgtcttgaagtatacttttgcactgtaacttgggttacgttaaagagagcttagcaccaaaggtagataatgaagaaatggcataggaaagtggagatgataaaaagttgattgttgaaccaaaaagggtttgaagggaagcttcgactgagtatcagaaattacttaaggcacataggacctgaatcaggaaaccagcacttcttacaactgccagttttaaaagaggaaatgattctgagatgtgctcattttattttaatttggtggttggtggttttccaagtagtctgtaaaatcctgcaagattcacagtctctggtgtgaaacctcagaagtgagtcgttgtgagcctgtgggcagcaccaccaaggcaggctaaggggagggtgcagtaagtggagtttgtgaggctgagtggctgaggagggagcaagtgcaacaaaatagggctagagaagaaccagccaaggagtggaacccatgctgctctcagagattcacggaacacggcagccttctgcaggcagttccatgcatgtgcactcacgctgcaatcacagatgtcccagtaattaacctttctaagtcttgtgaatgctgactgcactttcacctcctcgaaaagccattggaagtttttagagcagcagcagccacagtttgtaagacaaatgtagagggggacgcaaaagaaaagacaccaccaggaggaggattcagtgtgcagtcagcacagaccaacatcaaccaaggcaatggctgccctccactcttgggaagatggggggaggtttctgaaaacggaaatttggattggcagctagcagttatttcctatcagatgtactgtgcactttaacctaacttaaaatgtattttaatatttttctgtactgcacaaatacctgttttgtcaaatagcataatgatgtaaagaaacattttggacaaagagtgtatacaatttaagcaacattcaaaggttgactatataagtaggagtttagcctgctgcaccttcacgggcattcagaatgcggggtcctgaaatattttcttacgtgtatatatggtagcatgaagctttgtaatcattgttttgagagatttttttttcaaaattaaagtatttcttttgatattaatttttattattttcttgaagttggttgtgtaatgtaaatggcttcagtcttctgtaaaattgcttttttttcttttaaatgcagtccttctatggctaagacgtcttcaagatccttgtacactgtttatatgtgcaataaaatgcatggccagctgacagtatcgtcagtggacagaatgtatatagtgcaaatatccttccttttattatttaacagccattaaaaccttggatttgtacaaacca

SEQ ID NO: 319 - DNA, 2799 bp, Homo sapien
cgcagtccttagcttcccggggacaggaaaccttcaagaccgagctgccacggccgcctccccgcccgccccccattctacgcgcctgcccacaccctcctcccctccttccagcgcctttcggtggagcactgcggcactcagcccgagctgccgttttcccctcgcggggaacgctgtgacccccccgcaggagcggcggggcggggtgggggggcccgggagaagatggcgacgccgggaagcgaaccccaacctttcgtcccggccctttcggtagctactctgcacccacttcatcatccccaccaccaccaccaccaccatcagcaccacggaggaaccggcgcccccggcggggcgggtggtggcggcggtggcagcgggggcttcaacctgcccttgaaccggggtctggagcgcgcgcttgaggaggcggccaactccggggggctgaacctgagcgccaggaaattgaaggaatttccccgtaccgcagcccccgggcacgacctctcggacacggtgcaggcagacttatctaaaaacagactggttgaagttccaatggaattgtgccattttgtatcactggaaattcttaatctgtatcacaactgtatcagagtcattcctgaggccatcgttaatctgcagatgctgacttacctgaacttgagtcgaaatcagctgtccgccctgcctgcctgcctgtgtggtctgcctctcaaagtcttaatcgcaagtaacaacaaacttggatcattaccagaagagataggtcagctcaaacagttaatggagctggatgtcagctgcaacgagatcacagcgttgccccagcagataggtcagttgaaatctctacgagaactgaatgtcagaagaaattaccttaaagttttaccacaagaactagtagatcttcccttggtaaagtttgacttttcctgcaacaaagtgctcgtgattccaatttgttttagagagatgaagcagctgcaagtgttactacttgagaataaccctctgcagtctcctccagcacagatttgcacaaagggcaaagttcacatatttaagtatctgagcatacaagcatgccagattaagacagctgactccctttatctccacaccatggagaggccacatttacaccagcacgtggaagatggcaagaaggattctgattcgggagttggaagtgataatggagataagcgattatctgccaccgagccttctgacgaagacactgttagcctcaatgtgccaatgtcaaacatcatggaagaagaacagatcatcaaggaggactcgtgccatcgccttagccccgttaaaggggaatttcatcaggaatttcaaccggagccttcccttttgggtgacagcaccaactcaggagaagaaagagaccagtttactgatagagcagatggtctccattcggaatttatgaactataaggcaagggcagaagactgtgaagagctgttacggatagaagaggatgtgcactggcaaactgagggcataataagttcatccaaagatcaggacatggatatagcaatgatcgagcagctgagagaagcagtagatttgctgcaagatcccaatggattaagcacagatattacagagagaagtgttttaaacctatatcctatgggatcagcagaagccttagaattacaagattctgcactgaatggtcaaatacagctggagacatctccggtgtgtgaggtgcaaagtgatctaacattacagagtaacgggagccagtattctccaaatgagattagagagaactcccctgcagtctctcctaccacaaacagcacagctccatttggcctgaagcctcgatcagtgtttctaagacctcagagaaatttggaatctatagacccgcagtttacaatccggaggaaaatggagcagatgagagaagagaaagagctggtggaacaacttcgtgagagcattgagatgagattgaaggtcagtctacacgaagacctgggggcagccctcatggatggtgtcgtcctctgccatctggtcaaccacatccgcccacggtcggttgcaagcatccatgtcccatcaccagcggttcccaaacttagcatggccaaatgcagaagaaatgtggaaaactttttggaagcgtgccgaaaattaggagtaccagaggaaaagctatgtctcccccaccacatccttgaagaaaaaggcctggtcaaagtgggcattaccattcaagcattactagacatcaccgtaacgaaggctctgttcacatgaaactaccccttctccattgggggctcagactctgctctcatccaggatcctgaactctgctccaggcacctgttcaaccctctctcccacccactgcctgtcacttcactgactccagttacattgaaacaattttcagtctaagggaggattttctacctttcagagctgacctccgactttaagacttgacaggtatttatcttgaaaccagagagggagctggaggaaaaaaaaactgagcagcacatcaatgccttttccaccctccttcatcctttccacactcaccgactgccattaccaaaacgccaagcacaaccgttttgcagcaagacgcattcgttttattaaaaccaaactcattatgtatttagtggggggaggggggcacaatcaggtttttcaccaccaaattttttgggaaggattccctggtaacgtgtggccctttcaaaaaacaaattttacgggcctgtc

SEQ ID NO: 320 - DNA, 1064 bp, Homo sapien
gctttgctcttttcctttgtgactttttcataatgcttttttagcttaggaaatcctttcccatccatttatcagaaaaaagtactaaatattcacctttatgttattgggaggggtgttgtagatttttttttttttaatgttcaactctttatttgatttcaaattgattttaacatatggtatgaagtaaagaattgttttccccaagtaatatctggcaccaggaacttaactgtacttaacagccatttacaatttcctgcaaagccagatgtcgacttgggtgctgtcagagccaatagaatgaggaagacatatctttgcccttatagaacctgccttaacagtgaaatgccagattcaagtgatttcacaagcccgtggcagatggtgccgggaaggctggacactgtcatcaggccacagatatccctccactcttgggaagatggggggaggtttctgaaaacggaaatttggattggcagctagcagttatttcctatcagatgtactgtgcactttaacctaacttaaaatgtattttaatatttttctgtactgcacaaatacctgttttgtcaaatagcataatgatgtaaagaaacattttggacaaagagtgtatacaatttaagcaacattcaaaggttgactatataagtaggagtttagcctgctgcaccttcacgggcattcagaatgcggggtcctgaaatattttcttacgtgtatatatggtagcatgaagctttgtaatcattgttttgagagatttttttttcaaaattaaagtatttcttttgatattaatttttattattttcttgaagttggttgtgtaatgtaaatggcttcagtcttctgtaaaattgcttttttttcttttaaatgcagtccttctatggctaagacgtcttcaagatccttgtacactgtttatatgtgcaataaaatgcatggccagctgacagtatcgtcagtggacagaatgtatatagtgcaaatatccttccttttattatttaacagccattaaaaccttggatttgtacaaacca

SEQ ID NO: 321 - DNA, 2383 bp, Homo sapien
cgcagtccttagcttcccggggacaggaaaccttcaagaccgagctgccacggccgcctccccgcccgccccccattctacgcgcctgcccacaccctcctcccctccttccagcgcctttcggtggagcactgcggcactcagcccgagctgccgttttcccctcgcggggaacgctgtgacccccccgcaggagcggcggggcggggtgggggggcccgggagaagatggcgacgccgggaagcgaaccccaacctttcgtcccggccctttcggtagctactctgcacccacttcatcatccccaccaccaccaccaccaccatcagcaccacggaggaaccggcgcccccggcggggcgggtggtggcggcggtggcagcgggggcttcaacctgcccttgaaccggggtctggagcgcgcgcttgaggaggcggccaactccggggggctgaacctgagcgccaggaaattgaaggaatttccccgtaccgcagcccccgggcacgacctctcggacacggtgcaggcagacttatctaaaaacagactggttgaagttccaatggaattgtgccattttgtatcactggaaattcttaatctgtatcacaactgtatcagagtcattcctgaggccatcgttaatctgcagatgctgacttacctgaacttgagtcgaaatcagctgtccgccctgcctgcctgcctgtgtggtctgcctctcaaagtcttaatcgcaagtaacaacaaacttggatcattaccagaagagataggtcagctcaaacagttaatggagctggatgtcagctgcaacgagatcacagcgttgccccagcagataggtcagttgaaatctctacgagaactgaatgtcagaagaaattaccttaaagttttaccacaagaactagtagatcttcccttggtaaagtttgacttttcctgcaacaaagtgctcgtgattccaatttgttttagagagatgaagcagctgcaagtgttactacttgagaataaccctctgcagtctcctccagcacagatttgcacaaagggcaaagttcacatatttaagtatctgagcatacaagcatgccagattaagacagctgactccctttatctccacaccatggagaggccacatttacaccagcacgtggaagatggcaagaaggattctgattcgggagttggaagtgataatggagataagcgattatctgccaccgagccttctgacgaagacactgttagcctcaatgtgccaatgtcaaacatcatggaagaagaacagatcatcaaggaggactcgtgccatcgccttagccccgttaaaggggaatttcatcaggaatttcaaccggagccttcccttttgggtgacagcaccaactcaggagaagaaagagaccagtttactgatagagcagatggtctccattcggaatttatgaactataaggcaagggcagaagactgtgaagagctgttacggatagaagaggatgtgcactggcaaactgagggcataataagttcatccaaagatcaggacatggatatagcaatgatcgagcagctgagagaagcagtagatttgctgcaagatcccaatggattaagcacagatattacagagagaagtgttttaaacctatatcctatgggatcagcagaagccttagaattacaagattctgcactgaatggtcaaatacagctggagacatctccggtgtgtgaggtgcaaagtgatctaacattacagagtaacgggagccagtattctccaaatgaggtaagtttcttgaagattaatggaaggtgaggtgtttcttgatggctggattggaatatcttttacagaaatatataatctaagacttgtgattaattaattaattgagtctttgggggaatccgtctaactctcattagctatcatagctttatctggtcctattcgtaattaaagattaatttttatgagatatatttttaaaaaccgaatgtaggaacatctttacaagaaaacagaatgaagatcacttaaataggaaacatttagaatgtcttgttctccataaatgattcagtgtgtgattcagtattactgagttcagtattatctgtttcctcatcagatgtgccctcttttggatataaatggatatagtgtgtgtgtgtgcatgcacccatgcacacagctgtgcaagaggagtgccagtgtcacgtaattgtaaaatgttcttaaaatggacaaaacaaattgagtgggtcactctaaaacaaacattctgttggttatgccatttaacatctttacaaagtgattttttttggccaggacttcatcacacagcagcgaatgc

SEQ ID NO: 322 - DNA, 1675 bp, Homo sapien
cgcagtccttagcttcccggggacaggaaaccttcaagaccgagctgccacggccgcctccccgcccgccccccattctacgcgcctgcccacaccctcctcccctccttccagcgcctttcggtggagcactgcggcactcagcccgagctgccgttttcccctcgcggggaacgctgtgacccccccgcaggagcggcggggcggggtgggggggcccgggagaagatggcgacgccgggaagcgaaccccaacctttcgtcccggccctttcggtagctactctgcacccacttcatcatccccaccaccaccaccaccaccatcagcaccacggaggaaccggcgcccccggcggggcgggtggtggcggcggtggcagcgggggcttcaacctgcccttgaaccggggtctggagcgcgcgcttgaggaggcggccaactccggggggctgaacctgagcgccaggaaattgaaggaatttccccgtaccgcagcccccgggcacgacctctcggacacggtgcaggcagacttatctaaaaacagactggttgaagttccaatggaattgtgccattttgtatcactggaaattcttaatctgtatcacaactgtatcagagtcattcctgaggccatcgttaatctgcagatgctgacttacctgaacttgagtcgaaatcagctgtccgccctgcctgcctgcctgtgtggtctgcctctcaaagtcttaatcgcaagtaacaacaaacttggatcattaccagaagagataggtcagctcaaacagttaatggagctggatgtcagctgcaacgagatcacagcgttgccccagcagataggtcagttgaaatctctacgagaactgaatgtcagaagaaattaccttaaagttttaccacaagaactagtagatcttcccttggtaaagtttgacttttcctgcaacaaagtgctcgtgattccaatttgttttagagagatgaagcagctgcaagtgttactacttgagaataaccctctgcagtctcctccagcacagatttgcacaaagggcaaagttcacatatttaagtatctgagcatacaagcatgccagattaagacagctgactccctttatctccacaccatggagaggccacatttacaccagcacgtggaagatgggtgagtcatgccctcattcaaagccccagtttaaaatttgcctaggccaaggccctccaggtagctgacttcaaaatctgtttgttttaagtcaccatggtatctgcagaaaacaaagcaaaacagaacaatttggtttaatcacctaatttgtatttaaaacaagaagttgagaaactattgggatatgaaagaaaaaactgctgctattgagaatattttggtatatctcaaatatcatctgtctcctaatcaataatcagttcttcctgagtaaatatgtgcatacttataaataagatctagaatacaaatgtgaatattttttacttatcaaaataactatattgagcccagacatgcctttttagcaattattaatgttgaatatgcctccagaacaatgttaagaaaaaaatgaaggctttatttttggtcttttaaaaatgcagtatgtgtagttttgtcgccacttcctgtttcaaatggaaaagtta

SEQ ID NO: 323 - DNA, 4713 bp, Homo sapien
cgcagtccttagcttcccggggacaggaaaccttcaagaccgagctgccacggccgcctccccgcccgccccccattctacgcgcctgcccacaccctcctcccctccttccagcgcctttcggtggagcactgcggcactcagcccgagctgccgttttcccctcgcggggaacgctgtgacccccccgcaggagcggcggggcggggtgggggggcccgggagaagatggcgacgccgggaagcgaaccccaacctttcgtcccggccctttcggtagctactctgcacccacttcatcatccccaccaccaccaccaccaccatcagcaccacggaggaaccggcgcccccggcggggcgggtggtggcggcggtggcagcgggggcttcaacctgcccttgaaccggggtctggagcgcgcgcttgaggaggcggccaactccggggggctgaacctgagcgccaggaaattgaaggaatttccccgtaccgcagcccccgggcacgacctctcggacacggtgcaggcagacttatctaaaaacagactggttgaagttccaatggaattgtgccattttgtatcactggaaattcttaatctgtatcacaactgtatcagagtcattcctgaggccatcgttaatctgcagatgctgacttacctgaacttgagtcgaaatcagctgtccgccctgcctgcctgcctgtgtggtctgcctctcaaagtcttaatcgcaagtaacaacaaacttggatcattaccagaagagataggtcagctcaaacagttaatggagctggatgtcagctgcaacgagatcacagcgttgccccagcagataggtcagttgaaatctctacgagaactgaatgtcagaagaaattaccttaaagttttaccacaagaactagtagatcttcccttggtaaagtttgacttttcctgcaacaaagtgctcgtgattccaatttgttttagagagatgaagcagctgcaagtgttactacttgagaataaccctctgcagtctcctccagcacagatttgcacaaagggcaaagttcacatatttaagtatctgagcatacaagcatgccagattaagacagctgactccctttatctccacaccatggagaggccacatttacaccagcacgtggaagatggcaagaaggattctgattcgggagttggaagtgataatggagataagcgattatctgccaccgagccttctgacgaagacactgttagcctcaatgtgccaatgtcaaacatcatggaagaagaacagatcatcaaggaggactcgtgccatcgccttagccccgttaaaggggaatttcatcaggaatttcaaccggagccttcccttttgggtgacagcaccaactcaggagaagaaagagaccagtttactgatagagcagatggtctccattcggaatttatgaactataaggcaagggcagaagactgtgaagagctgttacggatagaagaggatgtgcactggcaaactgagggcataataagttcatccaaagatcaggacatggatatagcaatgatcgagcagctgagagaagcagtagatttgctgcaagatcccaatggattaagcacagatattacagagagaagtgttttaaacctatatcctatgggatcagcagaagccttagaattacaagattctgcactgaatggtcaaatacagctggagacatctccggtgtgtgaggtgcaaagtgatctaacattacagagtaacgggagccagtattctccaaatgagattagagagaactcccctgcagtctctcctaccacaaacagcacagctccatttggcctgaagcctcgatcagtgtttctaagacctcagagaaatttggaatctatagacccgcagtttacaatccggaggaaaatggagcagatgagagaagagaaagagctggtggaacaacttcgtgagagcattgagatgagattgaaggtcagtctacacgaagacctgggggcagccctcatggatggtgtcgtcctctgccatctggtcaaccacatccgcccacggtcggttgcaagcatccatgtcccatcaccagcggttcccaaacttagcatggccaaatgcagaagaaatgtggaaaactttttggaagcgtgccgaaaattaggagtaccagaggaaaagctatgtctcccccaccacatccttgaagaaaaaggcctggtcaaagtgggcattaccattcaagcattactagacatcaccgtaacgaaggctctgttcacatgaaactaccccttctccattgggggctcagactctgctctcatccaggatcctgaactctgctccaggcacctgttcaaccctctctcccacccactgcctgtcacttcactgactccagttacattgaaacaattttcagtctaagggaggattttctacctttcagagctgacctccgactttaagacttgacaggtatttatcttgaaaccagagagggagctggaggaaaaaaaaactgagcagcacatcaatgccttttccaccctccttcatcctttccacactcaccgactgccattaccaaaacgccaagcacaaccgttttgcagcaagacgcattcgttttattaaaaccaaactcattatgtatttagtggggggaggggggcacaatcaggtttttcaccaccaaatttttcgagaggtttcttgagaccattgccttttaaaaaactattttcgacatacaaaatatttatataaatattatttattagtgagttgttattcatcctttggatgcaaattgtaaattaggaaactattttattactgcttttttgtggttaaacactttattttaatataaatattgagttattttctatcctctttggtgtgcggtagtttaggtctcagtaatgtttctggtatatatgattccaaaaaaaagcgaaaaacaggtgcttttaggacacaacttttctggggaggcaatattgacactttggtttgtggaacgttggtcttatttatatttctgcattccatccagtttcctacattccagcagccctctgtcccccaatataatgaactgactaaaatcaagagagcaccccaaagttatttgtaaatagctgtgatggaaaaaaaaaagacatattaaacttgaagctaaaatgtgaacaattattttttggattcatacttcttttgctatgcacaaaacattcacgttttaacacaaagaaataataagtgttagcatcgtgtgtcttgaagtatacttttgcactgtaacttgggttacgttaaagagagcttagcaccaaaggtagataatgaagaaatggcataggaaagtggagatgataaaaagttgattgttgaaccaaaaagggtttgaagggaagcttcgactgagtatcagaaattacttaaggcacataggacctgaatcaggaaaccagcacttcttacaactgccagttttaaaagaggaaatgattctgagatgtgctcattttattttaatttggtggttggtggttttccaagtagtctgtaaaatcctgcaagattcacagtctctggtgtgaaacctcagaagtgagtcgttgtgagcctgtgggcagcaccaccaaggcaggctaaggggagggtgcagtaagtggagtttgtgaggctgagtggctgaggagggagcaagtgcaacaaaatagggctagagaagaaccagccaaggagtggaacccatgctgctctcagagattcacggaacacggcagccttctgcaggcagttccatgcatgtgcactcacgctgcaatcacagatgtcccagtaattaacctttctaagtcttgtgaatgctgactgcactttcacctcctcgaaaagccattggaagtttttagagcagcagcagccacagtttgtaagacaaatgtagagggggacgcaaaagaaaagacaccaccaggaggaggattcagtgtgcagtcagcacagaccaacatcaaccaaggcaatggctgccctccactcttgggaagatggggggaggtttctgaaaacggaaatttggattggcagctagcagttatttcctatcagatgtactgtgcactttaacctaacttaaaatgtattttaatatttttctgtactgcacaaatacctgttttgtcaaatagcataatgatgtaaagaaacattttggacaaagagtgtatacaatttaagcaacattcaaaggttgactatataagtaggagtttagcctgctgcaccttcacgggcattcagaatgcggggtcctgaaatattttcttacgtgtatatatggtagcatgaagctttgtaatcattgttttgagagatttttttttcaaaattaaagtatttcttttgatattaatttttattattttcttgaagttggttgtgtaatgtaaatggcttcagtcttctgtaaaattgcttttttttcttttaaatgcagtccttctatggctaagacgtcttcaagatccttgtacactgtttatatgtgcaataaaatgcatggccagctgacagtatcgtcagtggacagaatgtatatagtgcaaatatccttccttttattatttaacagccattaaaaccttggatttgtacaaacca

SEQ ID NO: 324 - DNA, 3006 bp, Homo sapien
cacgaggggaatgacaaggttgagcaggtcacatctgcggtgtgtgaggtgcagagtgatctaacgttacagatgaacgggggcaagtattcgccattggagattagagagaactcccctgcagtctctcctaccacaaacagcacagctccatttggcctgaagcctcgatcagtgtttctaagacctcagagaaatttggaatctatagacccgcagtttacaatccggaggaaaatggagcagatgagagaagagaaagagctggtggaacaacttcgtgagagcattgagatgagattgaaggtcagtctacacgaagacctgggggcagccctcatggatggtgtcgtcctctgccatctggtcaaccacatccgcccacggtcggttgcaagcatccatgtcccatcaccagcggttcccaaacttagcatggccaaatgcagaagaaatgtggaaaactttttggaagcgtgccgaaaattaggagtaccagaggaaaagctatgtctcccccaccacatccttgaagaaaaaggcctggtcaaagtgggcattaccattcaagcattactagacatcaccgtaacgaaggctctgttcacatgaaactaccccttctccattgggggctcagactctgctctcatccaggatcctgaactctgctccaggcacctgttcaaccctctctcccacccactgcctgtcacttcactgactccagttacattgaaacaattttcagtctaagggaggattttctacctttcagagctgacctccgactttaagacttgacaggtatttatcttgaaaccagagagggagctggaggaaaaaaaaactgagcagcacatcaatgccttttccaccctccttcatcctttccacactcaccgactgccattaccaaaacgccaagcacaaccgttttgcagcaagacgcattcgttttattaaaaccaaactcattatgtatttagtggggggaggggggcacaatcaggtttttcaccaccaaatttttcgagaggtttcttgagaccattgccttttaaaaaactattttcgacatacaaaatatttatataaatattatttattagtgagttgttattcatcctttggatgcaaattgtaaattaggaaactattttattactgcttttttgtggttaaacactttattttaatataaatattgagttattttctatcctctttggtgtgcggtagtttaggtctcagtaatgtttctggtatatatgattccaaaaaaaagcgaaaaacaggtgcttttaggacacaacttttctggggaggcaatattgacactttggtttgtggaacgttggtcttatttatatttctgcattccatccagtttcctacattccagcagccctctgtcccccaatataatgaactgactaaaatcaagagagcaccccaaagttatttgtaaatagctgtgatggaaaaaaaaaagacatattaaacttgaagctaaaatgtgaacaattattttttggattcatacttcttttgctatgcacaaaacattcacgttttaacacaaagaaataataagtgttagcatcgtgtgtcttgaagtatacttttgcactgtaacttgggttacgttaaagagagcttagcaccaaaggtagataatgaagaaatggcataggaaagtggagatgataaaaagttgattgttgaaccaaaaagggtttgaagggaagcttcgactgagtatcagaaattacttaaggcacataggacctgaatcaggaaaccagcacttcttacaactgccagttttaaaagaggaaatgattctgagatgtgctcattttattttaatttggtggttggtggttttccaagtagtctgtaaaatcctgcaagattcacagtctctggtgtgaaacctcagaagtgagtcgttgtgagcctgtgggcagcaccaccaaggcaggctaaggggagggtgcagtaagtggagtttgtgaggctgagtggctgaggagggagcaagtgcaacaaaatagggctagagaagaaccagccaaggagtggaacccatgctgctctcagagattcacggaacacggcagccttctgcaggcagttccatgcatgtgcactcacgctgcaatcacagatgtcccagtaattaacctttctaagtcttgtgaatgctgactgcactttcacctcctcgaaaagccattggaagtttttagagcagcagcagccacagtttgtaagacaaatgtagagggggacgcaaaagaaaagacaccaccaggaggaggattcagtgtgcagtcagcacagaccaacatcaaccaaggcaatggctgccctccactcttgggaagatggggggaggtttctgaaaacggaaatttggattggcagctagcagttatttcctatcagatgtactgtgcactttaacctaacttaaaatgtattttaatatttttctgtactgcacaaatacctgttttgtcaaatagcataatgatgtaaagaaacattttggacaaagagtgtatacaatttaagcaacattcaaaggttgactatataagtaggagtttagcctgctgcaccttcacgggcattcagaatgcggggtcctgaaatattttcttacgtgtatatatggtagcatgaagctttgtaatcattgttttgagagatttttttttcaaaattaaagtatttcttttgatattaatttttattattttcttgaagttggttgtgtaatgtaaatggcttcagtcttctgtaaaattgcttttttttcttttaaatgcagtccttctatggctaagacgtcttcaagatccttgtacactgtttatatgtgcaataaaatgcatggccagctgacagtatcgtcagtggacagaatgtatatagtgcaaatatccttccttttattatttaacagccattaaaaccttggatttgtacaaacca

SEQ ID NO: 325 - DNA, 4457 bp, Homo sapien
cgcagtccttagcttcccggggacaggaaaccttcaagaccgagctgccacggccgcctccccgcccgccccccattctacgcgcctgcccacaccctcctcccctccttccagcgcctttcggtggagcactgcggcactcagcccgagctgccgttttcccctcgcggggaacgctgtgacccccccgcaggagcggcggggcggggtgggggggcccgggagaagatggcgacgccgggaagcgaaccccaacctttcgtcccggccctttcggtagctactctgcacccacttcatcatccccaccaccaccaccaccaccatcagcaccacggaggaaccggcgcccccggcggggcgggtggtggcggcggtggcagcgggggcttcaacctgcccttgaaccggggtctggagcgcgcgcttgaggaggcggccaactccggggggctgaacctgagcgccaggaaattgaaggaatttccccgtaccgcagcccccgggcacgacctctcggacacggtgcaggcagacttatctaaaaacagactggttgaagttccaatggaattgtgccattttgtatcactggaaattcttaatctgtatcacaactgtatcagagtcattcctgaggccatcgttaatctgcagatgctgacttacctgaacttgagtcgaaatcagctgtccgccctgcctgcctgcctgtgtggtctgcctctcaaagtcttaatcgcaagtaacaacaaacttggatcattaccagaagagataggtcagctcaaacagttaatggagctggatgtcagctgcaacgagatcacagcgttgccccagcagataggtcagttgaaatctctacgagaactgaatgtcagaagaaattaccttaaagttttaccacaagaactagtagatcttcccttggtaaagtttgacttttcctgcaacaaagtgctcgtgattccaatttgttttagagagatgaagcagctgcaagtgttactacttgagaataaccctctgcagtctcctccagcacagatttgcacaaagggcaaagttcacatatttaagtatctgagcatacaagcatgccagattaagacagctgactccctttatctccacaccatggagaggccacatttacaccagcacgtggaagatggcaagaaggattctgattcgggagttggaagtgataatggagataagcgattatctgccaccgagccttctgacgaagacactgttagcctcaatgtgccaatgtcaaacatcatggaagaagaacagatcatcaaggaggactcgtgccatcgccttagccccgttaaaggggaatttcatcaggaatttcaaccggagccttcccttttgggtgacagcaccaactcaggagaagaaagagaccagtttactgatagagcagatggtctccattcggaatttatgaactataaggcaagggcagaagactgtgaagagctgttacggatagaagaggatgtgcactggcaaactgagggcataataagttcatccaaagatcaggacatggatatagcaatgatcgagcagctgagagaagcagtagatttgctgcaagatcccaatggattaagcacagatattacagagagaagtgttttaaacctatatcctatgggatcagcagaagccttagaattacaagattctgcactgaatggtcaaatacagctggagacatctccggtgtgtgaggtgcaaagtgatctaacattacagagtaacgggagccagtattctccaaatgagattagagagaactcccctgcagtctctcctaccacaaacagcacagctccatttggcctgaagcctcgatcagtgtttctaagacctcagagaaatttggaatctatagacccgcagtttacaatccggaggaaaatggagcagatgagagaagagaaagagctggtggaacaacttcgtgagagcattgagatgagattgaaggtcagtctacacgaagacctgggggcagccctcatggatggtgtcgtcctctgccatctggtcaaccacatccgcccacggtcggttgcaagcatccatgtcccatcaccagcggttcccaaacttagcatggccaaatgcagaagaaatgtggaaaactttttggaagcgtgccgaaaattaggagtaccagaggaaaagctatgtctcccccaccacatccttgaagaaaaaggcctggtcaaagtgggcattaccattcaagcattactagacatcaccgtaacgaaggctctgttcacatgaaactaccccttctccattgggggctcagactctgctctcatccaggatcctgaactctgctccaggcacctgttcaaccctctctcccacccactgcctgtcacttcactgactccagttacattgaaacaattttcagtctaagggaggattttctacctttcagagctgacctccgactttaagacttgacaggtatttatcttgaaaccagagagggagctggaggaaaaaaaaactgagcagcacatcaatgccttttccaccctccttcatcctttccacactcaccgactgccattaccaaaacgccaagcacaaccgttttgcagcaagacgcattcgttttattaaaaccaaactcattatgtatttagtggggggaggggggcacaatcaggtttttcaccaccaaatttttcgagaggtttcttgagaccattgccttttaaaaaactattttcgacatacaaaatatttatataaatattatttattagtgagttgttattcatcctttggatgcaaattgtaaattaggaaactattttattactgcttttttgtggttaaacactttattttaatataaatattgagttattttctatcctctttggtgtgcggtagtttaggtctcagtaatgtttctggtatatatgattccaaaaaaaagcgaaaaacaggtgcttttaggacacaacttttctggggaggcaatattgacactttggtttgtggaacgttggtcttatttatatttctgcattccatccagtttcctacattccagcagccctctgtcccccaatataatgaactgactaaaatcaagagagcaccccaaagttatttgtaaatagctgtgatggaaaaaaaaaagacatattaaacttgaagctaaaatgtgaacaattattttttggattcatacttcttttgctatgcacaaaacattcacgttttaacacaaagaaataataagtgttagcatcgtgtgtcttgaagtatacttttgcactgtaacttgggttacgttaaagagagcttagcaccaaaggtagataatgaagaaatggcataggaaagtggagatgataaaaagttgattgttgaaccaaaaagggtttgaagggaagcttcgactgagtatcagaaattacttaaggcacataggacctgaatcaggaaaccagcacttcttacaactgccagttttaaaagaggaaatgattctgagatgtgctcattttattttaatttggtggttggtggttttccaagtagtctgtaaaatcctgcaagattcacagtctctggtgtgaaacctcagaagtgagtcgttgtgagcctgtgggcagcaccaccaaggcaggctaaggggagggtgcagtaagtggagtttgtgaggctgagtggctgaggagggagcaagtgcaacaaaatagggctagagaagaaccagccaaggagtggaacccatgctgctctcagagattcacggaacacggcagccttctgcaggcagttccatgcatgtgcactcacgctgcaatcacagatgtcccagtaattaacctttctaagtcttgtgaatgctgactgcactttcacctcctcgaaaagccattggaagtttttagagcagcagcagccacagtttgtaagacaaatgtagagggggacgcaaaagaaaagacaccaccaggaggaggattcagtgtgcagtcagcacagaccaacatcaaccaaggcaatggctgccctccactcttgggaagatggggggaggtttctgaaaacggaaatttggattggcagctagcagttatttcctatcagatgtactgtgcactttaacctaaattaaagtatttcttttgatattaatttttattattttcttgaagttggttgtgtaatgtaaatggcttcagtcttctgtaaaattgcttttttttcttttaaatgcagtccttctatggctaagacgtcttcaagatccttgtacactgtttatatgtgcaataaaatgcatggccagctgacagtatcgtcagtggacagaatgtatatagtgcaaatatccttccttttattatttaacagccattaaaaccttggatttgtacaaacca

SEQ ID NO: 326 - DNA, 2712 bp, Homo sapien
cgcagtccttagcttcccggggacaggaaaccttcaagaccgagctgccacggccgcctccccgcccgccccccattctacgcgcctgcccacaccctcctcccctccttccagcgcctttcggtggagcactgcggcactcagcccgagctgccgttttcccctcgcggggaacgctgtgacccccccgcaggagcggcggggcggggtgggggggcccgggagaagatggcgacgccgggaagcgaaccccaacctttcgtcccggccctttcggtagctactctgcacccacttcatcatccccaccaccaccaccaccaccatcagcaccacggaggaaccggcgcccccggcggggcgggtggtggcggcggtggcagcgggggcttcaaccctctctcccacccactgcctgtcacttcactgactccagttacattgaaacaattttcagtctaagggaggattttctacctttcagagctgacctccgactttaagacttgacaggtatttatcttgaaaccagagagggagctggaggaaaaaaaaactgagcagcacatcaatgccttttccaccctccttcatcctttccacactcaccgactgccattaccaaaacgccaagcacaaccgttttgcagcaagacgcattcgttttattaaaaccaaactcattatgtatttagtggggggaggggggcacaatcaggtttttcaccaccaaatttttcgagaggtttcttgagaccattgccttttaaaaaactattttcgacatacaaaatatttatataaatattatttattagtgagttgttattcatcctttggatgcaaattgtaaattaggaaactattttattactgcttttttgtggttaaacactttattttaatataaatattgagttattttctatcctctttggtgtgcggtagtttaggtctcagtaatgtttctggtatatatgattccaaaaaaaagcgaaaaacaggtgcttttaggacacaacttttctggggaggcaatattgacactttggtttgtggaacgttggtcttatttatatttctgcattccatccagtttcctacattccagcagccctctgtcccccaatataatgaactgactaaaatcaagagagcaccccaaagttatttgtaaatagctgtgatggaaaaaaaaaagacatattaaacttgaagctaaaatgtgaacaattattttttggattcatacttcttttgctatgcacaaaacattcacgttttaacacaaagaaataataagtgttagcatcgtgtgtcttgaagtatacttttgcactgtaacttgggttacgttaaagagagcttagcaccaaaggtagataatgaagaaatggcataggaaagtggagatgataaaaagttgattgttgaaccaaaaagggtttgaagggaagcttcgactgagtatcagaaattacttaaggcacataggacctgaatcaggaaaccagcacttcttacaactgccagttttaaaagaggaaatgattctgagatgtgctcattttattttaatttggtggttggtggttttccaagtagtctgtaaaatcctgcaagattcacagtctctggtgtgaaacctcagaagtgagtcgttgtgagcctgtgggcagcaccaccaaggcaggctaaggggagggtgcagtaagtggagtttgtgaggctgagtggctgaggagggagcaagtgcaacaaaatagggctagagaagaaccagccaaggagtggaacccatgctgctctcagagattcacggaacacggcagccttctgcaggcagttccatgcatgtgcactcacgctgcaatcacagatgtcccagtaattaacctttctaagtcttgtgaatgctgactgcactttcacctcctcgaaaagccattggaagtttttagagcagcagcagccacagtttgtaagacaaatgtagagggggacgcaaaagaaaagacaccaccaggaggaggattcagtgtgcagtcagcacagaccaacatcaaccaaggcaatggctgccctccactcttgggaagatggggggaggtttctgaaaacggaaatttggattggcagctagcagttatttcctatcagatgtactgtgcactttaacctaacttaaaatgtattttaatatttttctgtactgcacaaatacctgttttgtcaaatagcataatgatgtaaagaaacattttggacaaagagtgtatacaatttaagcaacattcaaaggttgactatataagtaggagtttagcctgctgcaccttcacgggcattcagaatgcggggtcctgaaatattttcttacgtgtatatatggtagcatgaagctttgtaatcattgttttgagagatttttttttcaaaattaaagtatttcttttgatattaatttttattattttcttgaagttggttgtgtaatgtaaatggcttcagtcttctgtaaaattgcttttttttcttttaaatgcagtccttctatggctaagacgtcttcaagatccttgtacactgtttatatgtgcaataaaatgcatggccagctgacagtatcgtcagtggacagaatgtatatagtgcaaatatccttccttttattatttaacagccattaaaaccttggatttgtacaaacca

SEQ ID NO: 327 - DNA, 2785 bp, Homo sapien
cgcagtccttagcttcccggggacaggaaaccttcaagaccgagctgccacggccgcctccccgcccgccccccattctacgcgcctgcccacaccctcctcccctccttccagcgcctttcggtggagcactgcggcactcagcccgagctgccgttttcccctcgcggggaacgctgtgacccccccgcaggagcggcggggcggggtgggggggcccgggagaagatggcgacgccgggaagcgaaccccaacctttcgtcccggccctttcggtagctactctgcacccacttcatcatccccaccaccaccaccaccaccatcagcaccacggaggaaccggcgcccccggcggggcgggtggtggcggcggtggcagcgggggcttcaacctgcccttgaaccggggtctggagcgcgcgcttgaggaggcggccaactccggggggctgaacctgagcgccaggaaattgaaggaatttccccgtaccgcagcccccgggcacgacctctcggacacggtgcaggcagacttatctaaaaacagactggttgaagttccaatggaattgtgccattttgtatcactggaaattcttaatctgtatcacaactgtatcagagtcattcctgaggccatcgttaatctgcagatgctgacttacctgaacttgagtcgaaatcagctgtccgccctgcctgcctgcctgtgtggtctgcctctcaaagtcttaatcgcaagtaacaacaaacttggatcattaccagaagagataggtcagctcaaacagttaatggagctggatgtcagctgcaacgagatcacagcgttgccccagcagataggtcagttgaaatctctacgagaactgaatgtcagaagaaattaccttaaagttttaccacaagaactagtagatcttcccttggtaaagtttgacttttcctgcaacaaagtgctcgtgattccaatttgttttagagagatgaagcagctgcaagtgttactacttgagaataaccctctgcagtctcctccagcacagatttgcacaaagggcaaagttcacatatttaagtatctgagcatacaagcatgccagattaagacagctgactccctttatctccacaccatggagaggccacatttacaccagcacgtggaagatggcaagaaggattctgattcgggagttggaagtgataatggagataagcgattatctgccaccgagccttctgacgaagacactgttagcctcaatgtgccaatgtcaaacatcatggaagaagaacagatcatcaaggaggactcgtgccatcgccttagccccgttaaaggggaatttcatcaggaatttcaaccggagccttcccttttgggtgacagcaccaactcaggagaagaaagagaccagtttactgatagagcagatggtctccattcggaatttatgaactataaggcaagggcagaagactgtgaagagctgttacggatagaagaggatgtgcactggcaaactgagggcataataagttcatccaaagatcaggacatggatatagcaatgatcgagcagctgagagaagcagtagatttgctgcaagatcccaatggattaagcacagatattacagagagaagtgttttaaacctatatcctatgggatcagcagaagccttagaattacaagattctgcactgaagtatgcttgccttttataacaaattatgttttctcttttcataatacattgacatttctatgctttaaatttcactttgtatcttttttttttctttccttgttctcacagtggtcaaatacagctggagacatctccggtgtgtgaggtaaggctgctggtggattcaccagaactctgtgcaatattttgccatggaatactggccaccacattctgtaaagatttgtcagggagtgaaacatctttattaatgaggccaatattcagatttgttcaggacacatttttcaacttgtttatacgtttgcctctttagttctgcttttctgctatacctcaccctctgttgaagatgagagttggctatttctattagattctgtagattttttttacctcagatcatcttgctgagtcaagcgatggcaactaaaatacatagggaatctgcctgtgtgtcagaacctggaggaggaccattcaatgtagattttagagccaagaaaaggtctgggaattggccagatggaaattagctagaaaacacctgaaagacaagaacaaattatttgggaatgtcgaggaggattgagagaatatcatgaagagaaactggtggtgatatttgaagacagggtaaggatgggttcagtagagttacatggagtgaaatttggatggctgtaaagaaagcagttttgacataacactagagatgaccttagaatgtcctaaagccagaatgttaccccaggattagagagagaagttcgagctggtgatttgggaatgaaacataggctacaacccatttcctgaatggatttaggatggctaatttaggcaccaagattgtgtacaaacaccttatgccccactgaggtgtttgcacatgtactatagtaaagcggtttcacgctcttaactttgtctctatgttaaagaaataaggaaaagggaagtattaatgtaaaagggaaagccatgttgctagagagtgtggtttcattgttaagcgcagcgacttggaattatattaggtatcagtcccatctcaaagactg

SEQ ID NO: 328 - DNA, 1079 bp, Homo sapien
cgcagtccttagcttcccggggacaggaaaccttcaagaccgagctgccacggccgcctccccgcccgccccccattctacgcgcctgcccacaccctcctcccctccttccagcgcctttcggtggagcactgcggcactcagcccgagctgccgttttcccctcgcggggaacgctgtgacccccccgcaggagcggcggggcggggtgggggggcccgggagaagatggcgacgccgggaagcgaaccccaacctttcgtcccggccctttcggtagctactctgcacccacttcatcatccccaccaccaccaccaccaccatcagcaccacggaggaaccggcgcccccggcggggcgggtggtggcggcggtggcagcgggggcttcaacctgcccttgaaccggggtctggagcgcgcgcttgaggaggcggccaactccggggggctgaacctgagcgccaggaaattgaaggaatttccccgtaccgcagcccccgggcacgacctctcggacacggtgcaggcagacttatctaaaaacagactggttgaagttccaatggaattgtgccattttgtatcactggaaattcttaatctgtatcacaactgtatcagagtcattcctgaggccatcgttaatctgcagatgctgacttacctgaacttgaggtaggttaaacataaaagttgtaatcaaattcagtgaaagaaataaaaaacttatgctttcatttctatccattttttcccctttttgcaattcttgatttttctttgatgtaggtcacacacagatgttttaagtaataacttttctaataaatttgtaatgttgttaatactgtccttggtgctagacttccctgaatgtgaataagacaaggtttttttttaaaaaaatgatttatattatatcatttattctctttgtctaattggcatttgtaaggttgtagttatattgtcttcaagtattcatgtagattttggaggaggaagtataaaggaagtgaaaaagagtttggttgtcaggacaaacaaggagcaaaaaaaaaaaaaaaaaaaaga

SEQ ID NO: 329 - DNA, 736 bp, Homo sapien
gtggtttagaattaagcaagagtggaagctgggaaaccactttgcaggcttttccagtgatcaggatgagagaagatgttagctaggactagaggggtggtggtagaaatgggagagaagtggatggatttagatatattttggagttggaatcagcagaacttagtgatgagttttatgtgtagcttgaggaagcaagagatgatcaaagatgacttccaggttctctgacttaatttaataaagaaagtggtttgaagccacttgggaaagttcatgttgactagataagaggacattttgaataatgaaaggattcataaatatagtgcagaaagtcatttttgagagcatagatatagcttagatgatgcttgaacctgtgtttcaaaaattttgcaggtagattttattacagtgtctttggtagtcttacagcagcatcagcaaaagacatgataaaggaattaatattagaatccatccaactaataacacattgtttattgagtgcctgctatgttctagaaactatggtacggggaggggctatcagaaggacatagtttctgttctcttagagcttatagtctggaagggactatcttgaataatcaaactttgcatggaacattatctaagtcaaagataattgaaatatttagcaagatttttttcaaaaggagtcagccacttattggttttaatttttttaaaaaattattgcaggcagtag

SEQ ID NO: 330 - DNA, 735 bp, Homo sapien
tggtttagaattaagcaagagtggaagctgggaaaccactttgcaggcttttccagtgatcaggatgagagaagatgttagctaggactagaggggtggtggtagaaatgggagagaagtggatggatttagatatattttggagttggaatcagcagaacttagtgatgagttttatgtgtagcttgaggaagcaagagatgatcaaagatgacttccaggttctctgacttaatttaataaagaaagtggtttgaagccacttgggaaagttcatgttgactagataagaggacattttgaataatgaaaggattcataaatatagtgcagaaagtcatttttgagagcatagatatagcttagatgatgcttgaacctgtgtttcaaaaattttgcaggtagattttattacagtgtctttggtagtcttacagcagcatcagcaaaagacatgataaaggaattaatattagaatccatccaactaataacacattgtttattgagtgcctgctatgttctagaaactatggtacggggaggggctatcagaaggacatagtttctgttctcttagagcttatagtctggaagggactatcttgaataatcaaactttgcatggaacattatctaagtcaaagataattgaaatatttagcaagatttttttcaaaaggagtcagccacttattggttttaatttttttaaaaaattattgcaggcagtag

SEQ ID NO: 331 - DNA, 711 bp, Homo sapien
ctccctttcctctccccagcttttggttgtcctgctgagaggatgcggcatttgagcagtagcttctggagcccagagtgaagccccacccaggcaccctgacaggaccacaggaatgctcctggcacagcaagcaggactcttgagaagctcagcctccacgctccttgtagatgttcagttcaaactccacagtttgtgtgactcactgaagggcttggtttggctctcgctgacgagtctgtcatcggtgccaggagctgagaacagcccccttcctatttgaggctggcctgtccatgcgcacccttggcctcacatcaatggaggatcacccatcccttcctcgtgctagaaacccaatggctgtattccataagcctgcaggactcttgctcttctccttatttaactacaccagcttaggagtagcctacatgctccatcttcatttccttaccccatctactccacagtctaccattctcttgctgaggttacttacctggcctctttcctctacactcttttccacactcacttgtccaggtgcacattaatacctacacctgactatcctacagataactcgaattcaagatggtgggggaataaactcaccatcttactctatatgtctgcctgtccttcagtatttctcatgtgggataagggtgctatgattcacccacttgtccaagacagaacacc

SEQ ID NO: 332 - DNA, 1136 bp, Homo sapien
gggattacaggaatcgaagggccaaggaatgtgtttttcgttgatgtcagcttgctgcaaaggaccacacctgcttctcgacccatgaacgtgggaaagggaaaggcttggcttgttttggtggagatggagatgctggtaacagtggaggaatgccctccttctgattcacagtggggaggtgctctgggcccctgccactgcccgaggacttcaggtaagtcagcccgtggcccccagcccttccctgccagacgccctggcagacggcttgttctgacaagtatgcgctttctggatggaacagcctcccttttgtccaaacccttcctttgaatttaaaatgcacaaagaacctttcgaagaggcagctcctgcccaagagtttctgtaatttgctcccacatcacgtcatgacttttggctcccagccagcttttggttgtcctgctgagaggatgcggcatttgagcagtagcttctggagcccagagtgaagccccacccaggcaccctgacaggaccacaggaatgctcctggcacagcaagcaggactcttgagaagctcagcctccacgctccttgtagatgttcagttcaaactccacagtttgtgtgactcactgaagggcttggtttggctctcgctgacgagtctgtcatcggtgccaggagctgagaacagcccccttcctatttgaggctggcctgtccatgcgcacccttggcctcacatcaatggaggatcacccatcccttcctcgtgctagaaacccaatggctgtattccataagcctgcaggactcttgctcttctccttatttaactacaccagcttaggagtagcctacatgctccatcttcatttccttaccccatctactccacagtctaccattctcttgctgaggttacttacctggcctctttcctctacactcttttccacactcacttgtccaggtgcacattaatacctacacctgactatcctacagataactcgaattcaagatggtgggggaataaactcaccatcttactctatatgtctgcctgtccttcagtatttctcatgtgggataagggtgctatgattcacccacttgtccaagacagaacacctcgatgtca

SEQ ID NO: 333 - DNA, 1565 bp, Homo sapien
gcaggcccgaggccatcctgctctgggccagagcgtgcctgtgtctgatgagcgaggacatgcctcgtctggctgagccttccatttcacaccggcagctcgaaccccccatcacggcttccttttgggctcccctcctcaggggaccgagcttgaaatgtgcttgcccttcatccctaaggcctgcgtcccttcctcagagaggactaagcccctctcccagtcttgatgttctccgaggcccttcttattcacagaacctatctggcttatttattcgcttgcttgcttctgatgtcttctcttactgaaaggaatcgaagggccaaggaatgtgtttttcgttgatgtcagcttgctgcaaaggaccacacctgcttctcgacccaggaacgtgggaaagggaaaggcttggcttgttttggtggagatggagatgctggtaacagtggaggaatgccctccttctgattcacagtggggaggtgctctgggcccctgccactgcccgaggacttcaggtaagtcagcccgtggcccccagcccttccctgccagacgccctggcagacggcttgttctgacaagtatgcgctttctggatggaacagcctcccttttgtccaaacccttcctttgaatttaaaatgcacaaagaacctttcgaagaggaaaagaatgggatcaggaagaggaggctgtatctcatttggacactcaagccctcagctcctgcccaagagtttctgtaatttgctcccacatcacgtcatgacttttggctcccagccaggtgcggtggcatctgtggcttcatccttctgggaagtcagggtcatgttcccttgagtcttctccctttcctctccccagcttttggttgtcctgctgagaggatgcggcatttgagcagtagcttctggagcccagagtgaagccccacccaggcaccctgacaggaccacaggaatgctcctggcacagcaagcaggactcttgagaagctcagcctccacgctccttgtagatgttcagttcaaactccacagtttgtgtgactcactgaagggcttggtttggctctcgctgacgagtctgtcatcggtgccaggtgacacgcttttcccctcctcccgtctagtcctctctcttgccccagggcttctggtggggaagtttaacctcctcttcataagcagtgggagggctactgtgctgccctctggcccaagctctggtattccctttgcagtggtgggtgctctcattcctttgcatgtgccctgcagtgtgaacccaggggatccacgagacagggaactcacgtctgttttcttcatttggtgtagcatgccattgggcgtttgccagacagggcctatcatgtgggtcctacacctattcacacacctgccatttgccttcagaatcctgttcccagtgggtaatgggtttaaaagcccatagctgagtttatccacattggatccgacccacattccatgctcttgtaagtctccagttggtcaaatgagcagtttgatcccttgatccttcaaaatact

SEQ ID NO: 334 - DNA, 1749 bp, Homo sapien
gctcgaggttgaggaggaaagccattacttcaccaatgtgaatcaaggtcattcgtcacctcgggaagcacacagagctgcgacgttcaggagggaggcacgctgctcccaagccaaaccacgatgcagcctggcaccagtcccatgcagcagggagaaggggagtttctggaagcgaggatgagctgggcagccaggcccagggccctggccgtgcatgcatcagcccctcctgagaaaaagagctcaaggactacatggggtcttacccacgagtggggcaacggtgcagtttccaggaggcgttggcaggagctgaccggccactgacgctggccggggtccctaggggacagggactggagggtcagcggcctctgaccgtccagcgtcatctgaggaaatcaggccaatcgtgagccaccagagtgtcctcaccgagacggcctctctccctagtataacaagccacatttgctgcctttctgggagagttagaagcaagccacgtgggtgacttcttttcaaagttctctgcctcagaggaggaagccccatgggtggaggccaggcccgaggccatcctgctctgggccagagcgtgcctgtgtctgatgagcgaggacatgcctcgtctggctgagccttccatttcacaccggcagctcgaaccccccatcacggcttccttttgggctcccctcctcaggggaccgagcttgaaatgtgcttgcccttcatccctaaggcctgcgtcccttcctcagagaggactaagcccctctcccagtcttgatgttctccgaggcccttcttattcacagaacctatctggcttatttattcgcttgcttgcttctgatgtcttctcttactgaaagcttgctgcaaaggaccacacctgcttctcgacccaggaacgtgggaaagggaaaggcttggcttgttttggtggagatggagatgctggtaacagtggaggaatgccctccttctgattcacagtggggaggtgctctgggcccctgccactgcccgaggacttcagcttttggttgtcctgctgagaggatgcggcatttgagcagtagcttctggagcccagagtgaagccccacccaggcaccctgacaggaccacaggaatgctcctggcacagcaagcaggactcttgagaagctcagcctccacgctccttgtagatgttcagttcaaactccacagtttgtgtgactcactgaagggcttggtttggctctcgctgacgagtctgtcatcggtgccaggagctgagaacagcccccttcctatttgaggctggcctgtccatgcgcacccttggcctcacatcaatggaggatcacccatcccttcctcgtgctagaaacccaatggctgtattccataagcctgcaggactcttgctcttctccttatttaactacaccagcttaggagtagcctacatgctccatcttcatttccttaccccatctactccacagtctaccattctcttgctgaggttacttacctggcctctttcctctacactcttttccacactcacttgtccaggtgcacattaatacctacacctgactatcctacagataactcgaattcaagatggtgggggaataaactcaccatcttactctatatgtctgcctgtccttcagtatttctcatgtgggataagggtgctatgattcacccacttgtccaagacagaacacctcgatgtca

SEQ ID NO: 335 - DNA, 1815 bp, Homo sapien
gctcgaggttgaggaggaaagccattacttcaccaatgtgaatcaaggtcattcgtcacctcgggaagcacacagagctgcgacgttcaggagggaggcacgctgctcccaagccaaaccacgatgcagcctggcaccagtcccatgcagcagggagaaggggagtttctggaagcgaggatgagctgggcagccaggcccagggccctggccgtgcatgcatcagcccctcctgagaaaaagagctcaaggactacatggggtcttacccacgagtggggcaacggtgcagtttccaggaggcgttggcaggagctgaccggccactgacgctggccggggtccctaggggacagggactggagggtcagcggcctctgaccgtccagcgtcatctgaggaaatcaggccaatcgtgagccaccagagtgtcctcaccgagacggcctctctccctagtataacaagccacatttgctgcctttctgggagagttagaagcaagccacgtgggtgacttcttttcaaagttctctgcctcagaggaggaagccccatgggtggaggccaggcccgaggccatcctgctctgggccagagcgtgcctgtgtctgatgagcgaggacatgcctcgtctggctgagccttccatttcacaccggcagctcgaaccccccatcacggcttccttttgggctcccctcctcaggggaccgagcttgaaatgtgcttgcccttcatccctaaggcctgcgtcccttcctcagagaggactaagcccctctcccagtcttgatgttctccgaggcccttcttattcacagaacctatctggcttatttattcgcttgcttgcttctgatgtcttctcttactgaaagcttgctgcaaaggaccacacctgcttctcgacccaggaacgtgggaaagggaaaggcttggcttgttttggtggagatggagatgctggtaacagtggaggaatgccctccttctgattcacagtggggaggtgctctgggcccctgccactgcccgaggacttcagcttttggttgtcctgctgagaggatgcggcatttgagcagtagcttctggagcccagagtgaagccccacccaggcaccctgacaggaccacaggaatgctcctggcacagcaagcaggactcttgagaagctcagcctccacgctccttgtagatgttcagttcaaactccacagtttgtgtgactcactgaagggcttggtttggctctcgctgacgagtctgtcatcggtgccaggagctgagaacagcccccttcctatttgaggctggcctgtccatgcgcacccttggcctcacatcaatggaggatcacccatcccttcctcgtgctagaaacccaatggctgtattccataagcctgcaggactcttgctcttctccttatttaactacaccagcttaggagtagcctacatgctccatcttcatttccttaccccatctactccacagtctaccattctcttgctgaggttacttacctggcctctttcctctacactcttttccacactcacttgtccaggtgcacattaatacctacacctgactatcctacagataactcgaattcaagatggtgggggaataaactcaccatcttactctatatgtctgcctgtccttcagtatttctcatgtgggataagggtgctatgattcacccacttgtccaagacagaacacctcgatgtcattctttttttaaatttttaatttttttttgagacagagtttcgctgttatcacccaggctggagtg

SEQ ID NO: 336 - DNA, 2132 bp, Homo sapien
gctcgaggttgaggaggaaagccattacttcaccaatgtgaatcaaggtcattcgtcacctcgggaagcacacagagctgcgacgttcaggagggaggcacgctgctcccaagccaaaccacgatgcagcctggcaccagtcccatgcagcagggagaaggggagtttctggaagcgaggatgagctgggcagccaggcccagggccctggccgtgcatgcatcagcccctcctgagaaaaagagctcaaggactacatggggtcttacccacgagtggggcaacggtgcagtttccaggaggcgttggcaggagctgaccggccactgacgctggccggggtccctaggggacagggactggagggtcagcggcctctgaccgtccagcgtcatctgaggaaatcaggccaatcgtgagccaccagagtgtcctcaccgagacggcctctctccctagtataacaagccacatttgctgcctttctgggagagttagaagcaagccacgtgggtgacttcttttcaaagttctctgcctcagaggaggaagccccatgggtggaggccaggcccgaggccatcctgctctgggccagagcgtgcctgtgtctgatgagcgaggacatgcctcgtctggctgagccttccatttcacaccggcagctcgaaccccccatcacggcttccttttgggctcccctcctcaggggaccgagcttgaaatgtgcttgcccttcatccctaaggcctgcgtcccttcctcagagaggactaagcccctctcccagtcttgatgttctccgaggcccttcttattcacagaacctatctggcttatttattcgcttgcttgcttctgatgtcttctcttactgaaaggaatcgaagggccaaggaatgtgtttttcgttgatgtcagcttgctgcaaaggaccacacctgcttctcgacccaggaacgtgggaaagggaaaggcttggcttgttttggtggagatggagatgctggtaacagtggaggaatgccctccttctgattcacagtggggaggtgctctgggcccctgccactgcccgaggacttcaggtaagtcagcccgtggcccccagcccttccctgccagacgccctggcagacggcttgttctgacaagtatgcgctttctggatggaacagcctcccttttgtccaaacccttcctttgaatttaaaatgcacaaagaacctttcgaagaggaaaagaatgggatcaggaagaggaggctgtatctcatttggacactcaagccctcagctcctgcccaagagtttctgtaatttgctcccacatcacgtcatgacttttggctcccagccaggtgcggtggcatctgtggcttcatccttctgggaagtcagggtcatgttcccttgagtcttctccctttcctctccccagcttttggttgtcctgctgagaggatgcggcatttgagcagtagcttctggagcccagagtgaagccccacccaggcaccctgacaggaccacaggaatgctcctggcacagcaagcaggactcttgagaagctcagcctccacgctccttgtagatgttcagttcaaactccacagtttgtgtgactcactgaagggcttggtttggctctcgctgacgagtctgtcatcggtgccaggtgacacgcttttcccctcctcccgtctagtcctctctcttgccccagggcttctggtggggaagtttaacctcctcttcataagcagtgggagggctactgtgctgccctctggcccaagctctggtattccctttgcagtggtgggtgctctcattcctttgcatgtgccctgcagtgtgaacccaggggatccacgagacagggaactcacgtctgttttcttcatttggtgtagcatgccattgggcgtttgccagacagggcctatcatgtgggtcctacacctattcacacacctgccatttgccttcagaatcctgttcccagtgggtaatgggtttaaaagcccatagctgagtttatccacattggatccgacccacattccatgctcttgtaagtctccagttggtcaaatgagcagtttgatcccttgatccttcaaaatact

SEQ ID NO: 337 - DNA, 1132 bp, Homo sapien
gaaataaatgaagaggaggcgggggtcaggaggggcatgttttatatgagtagataccatgcaaaggtcctcctgggtgccatcgccagtgcggggcagcctgcgagccccttgagggaggtctccctcaaccsmacwcctcctggggccgagcaggagtcacatccaagggctgggtcattatctgataaatgagtgggttgtgcggatgagtaaacagggactgacccagaggtcaggtgtaactcagcctcagaaackgcgtgtgtcaataggaatcgaagggccaaggaatgtgtttttcgttgatgtcagcttgctgcaaaggaccacacctgcttctcgacccaggaacgtgggaaagggaaaggcttggcttgttttggtggagatggagatgctggtaacagtggaggaatgccctccttctgattcacagtggggaggtgctctgggcccctgccactgcccgaggacttcaggtaagtcagcccgtggcccccagcccttccctgccagacgccctggcagacggcttgttctgacaagtatgcgctttctggatggaacagcctcccttttgtccaaacccttcctttgaatttaaaatgcacaaagaacctttcgaagaggaaaagaatgggatcaggaagaggaggctgtatctcatttggacactcaagccctcagctcctgcccaagagtttctgtaatttgctcccacatcacgtcatgacttttggctcccagccagcttttggttgtcctgctgagaggatgcggcatttgagcagtagcttctggagcccagagtgaagccccacccaggcaccctgacaggaccacaggaatgctcctggcacagcaagcaggactcttgagaagctcagcctccacgctccttgtagatgttcagttcaaactccacagtttgtgtgactcactgaagggcttggtttggctctcgctgacgagtctgtcatcggtgccagacaaccgggtttcaccgtgttagccaggctggcctcaaactcctgacctcaagtgatccacccgcatcgacctcacaaagtgcttggattacaggtgtaagctactgtgccaggccagaaaaaataaaataaaataaaat

SEQ ID NO: 338 - DNA, 1454 bp, Homo sapien
gaaataaatgaagaggaggcgggggtcaggaggggcatgttttatatgagtagataccatgcaaaggtcctcctgggtgccatcgccagtgcggggcagcctgcgagccccttgagggaggtctccctcaaccsmacwcctcctggggccgagcaggagtcacatccaagggctgggtcattatctgataaatgagtgggttgtgcggatgagtaaacagggactgacccagaggtcaggtgtaactcagcctcagaaackgcgtgtgtcaataggaatcgaagggccaaggaatgtgtttttcgttgatgtcagcttgctgcaaaggaccacacctgcttctcgacccaggaacgtgggaaagggaaaggcttggcttgttttggtggagatggagatgctggtaacagtggaggaatgccctccttctgattcacagtggggaggtgctctgggcccctgccactgcccgaggacttcaggtaagtcagcccgtggcccccagcccttccctgccagacgccctggcagacggcttgttctgacaagtatgcgctttctggatggaacagcctcccttttgtccaaacccttcctttgaatttaaaatgcacaaagaacctttcgaagaggaaaagaatgggatcaggaagaggaggctgtatctcatttggacactcaagccctcttttggttgtcctgctgagaggatgcggcatttgagcagtagcttctggagcccagagtgaagccccacccaggcaccctgacaggaccacaggaatgctcctggcacagcaagcaggactcttgagaagctcagcctccacgctccttgtagatgttcagttcaaactccacagtttgtgtgactcactgaagggcttggtttggctctcgctgacgagtctgtcatcggtgccaggagctgagaacagcccccttcctatttgaggctggcctgtccatgcgcacccttggcctcacatcaatggaggatcacccatcccttcctcgtgctagaaacccaatggctgtattccataagcctgcaggactcttgctcttctccttatttaactacaccagcttaggagtagcctacatgctccatcttcatttccttaccccatctactccacagtctaccattctcttgctgaggttacttacctggcctctttcctctacactcttttccacactcacttgtccaggtgcacattaatacctacacctgactatcctacagataactcgaattcaagatggtgggggaataaactcaccatcttactctatatgtctgcctgtccttcagtatttctcatgtgggataagggtgctatgattcacccacttgtccaagacagaacacctcgatgtcattctttttttaaatttttaatttttttttgagacagagtttcgctgttatcacccaggctggagtg

SEQ ID NO: 339 - DNA, 596 bp, Homo sapien
tgtttcccttggtctctacttccctgattccctcctctcctacttgtctttctcttcttctctccaggagctgagaacagcccccttcctatttgaggctggcctgtccatgcgcacccttggcctcacatcaatggaggatcacccatcccttcctcgtgctagaaacccaatggctgtattccataagcctgcaggactcttgctcttctccttatttaactacaccagcttaggagtagcctacatgctccatcttcatttccttaccccatctactccacagtctaccattctcttgctgaggttacttacctggcctctttcctctacactcttttccacactcacttgtccaggtgcacattaatacctacacctgactatcctacagataactcgaattcaagatggtgggggaataaactcaccatcttactctatatgtctgcctgtccttcagtatttctcatgtgggataagggtgctatgattcacccacttgtccaagacagaacacctcgatgtcattctttttttaaatttttaatttttttttgagacagagtttcgctgttatcacccaggctggagtg

SEQ ID NO: 340 - DNA, 1467 bp, Homo sapien
gaaataaatgaagaggaggcgggggtcaggaggggcatgttttatatgagtagataccatgcaaaggtcctcctgggtgccatcgccagtgcggggcagcctgcgagccccttgagggaggtctccctcaaccsmacwcctcctggggccgagcaggagtcacatccaagggctgggtcattatctgataaatgagtgggttgtgcggatgagtaaacagggactgacccagaggtcaggtgtaactcagcctcagaaackgcgtgtgtcaataggaatcgaagggccaaggaatgtgtttttcgttgatgtcagcttgctgcaaaggaccacacctgcttctcgacccaggaacgtgggaaagggaaaggcttggcttgttttggtggagatggagatgctggtaacagtggaggaatgccctccttctgattcacagtggggaggtgctctgggcccctgccactgcccgaggacttcaggtaagtcagcccgtggcccccagcccttccctgccagacgccctggcagacggcttgttctgacaagtatgcgctttctggatggaacagcctcccttttgtccaaacccttcctttgaatttaaaatgcacaaagaacctttcgaagaggcagctcctgcccaagagtttctgtaatttgctcccacatcacgtcatgacttttggctcccagccagcttttggttgtcctgctgagaggatgcggcatttgagcagtagcttctggagcccagagtgaagccccacccaggcaccctgacaggaccacaggaatgctcctggcacagcaagcaggactcttgagaagctcagcctccacgctccttgtagatgttcagttcaaactccacagtttgtgtgactcactgaagggcttggtttggctctcgctgacgagtctgtcatcggtgccaggagctgagaacagcccccttcctatttgaggctggcctgtccatgcgcacccttggcctcacatcaatggaggatcacccatcccttcctcgtgctagaaacccaatggctgtattccataagcctgcaggactcttgctcttctccttatttaactacaccagcttaggagtagcctacatgctccatcttcatttccttaccccatctactccacagtctaccattctcttgctgaggttacttacctggcctctttcctctacactcttttccacactcacttgtccaggtgcacattaatacctacacctgactatcctacagataactcgaattcaagatggtgggggaataaactcaccatcttactctatatgtctgcctgtccttcagtatttctcatgtgggataagggtgctatgattcacccacttgtccaagacagaacacctcgatgtcattctttttttaaatttttaatttttttttgagacagagtttcgctgttatcacccaggctggagtg

SEQ ID NO: 341 - DNA, 467 bp, Homo sapien
  misc_feature (166)..(166): n=a,c,g or t
caggaagaccctctcagaaaaaaaaaaaaaagaatttggccgttatgtggaggactggaattgagaagggcaagagcgaggtagaagagtggtctagggagaacagttaggggctattgcaattatccagcaagagatcttggaccaggatggcagcagtggaggnggtaaaatgtggttggatgaagcgtacgctttgaaggtatcaacaggaccagctgatggaagggagtcaacaggactagctgatggctgtaaactggggggtcactagctatcagatggcatttacttaaagccatggaagtaggtgagctcccttatggagagggaataggaaggaggtagaccattctatcaaaatgctctttctacagggcacttctcactgagatattatttatctgggatttatattatttattcaatttgttttgtgtttggttctattagaaaagctccatagg

SEQ ID NO: 342 - DNA, 783 bp, Homo sapien
  misc_feature (166)..(166): n=a,c,g or t
  misc_feature (506)..(607): n=a,c,g or t
caggaagaccctctcagaaaaaaaaaaaaaagaatttggccgttatgtggaggactggaattgagaagggcaagagcgaggtagaagagtggtctagggagaacagttaggggctattgcaattatccagcaagagatcttggaccaggatggcagcagtggaggnggtaaaatgtggttggatgaagcgtacgctttgaaggtatcaacaggaccagctgatggaagggagtcaacaggactagctgatggctgtaaactggggggtcactagctatcagatggcatttacttaaagccatggaagtaggtgagctcccttatggagagggaataggaaggaggtagaccattctatcaaaatgctctttctacagggcacttctcactgagatattatttatctgggatttatattatttattcaatttgttttgtgtttggttctattagaaaagctccatagggcccgggcacgtttggcttttgcctgtaatcccaacacnnnnnnnnnnnnnnnnnnnnnnnnnnnnnnnnnnnnnnnnnnnnnnnnnnnnnnnnnnnnnnnnnnnnnnnnnnnnnnnnnnnnnnnnnnnnnnnnnnnnnntcagctccttctttcattccagacctgccccctggagatcgctccctgaatgcccctcagacaccacaggctcggcgagaaattgatctccccagcttttccccagctctggcccccatcgtgtttctcatttccgtggacacccacgccagaaacctggatctcatccttgcctt

SEQ ID NO: 343 - DNA, 1305 bp, Homo sapien
tttgtgattaacctttctttgcctcagcttccttatttataaaatggagataatggaacctatttagtagagtttttaggaagatgaaaataatttcataaaatacttagaattgtagtgggacagattaaattctgtatatgtgtttagaaaacatattcattcatttgttccacaactattcattgagtgctcacacactagacattgatttacggtcatggaataagtacatcagacaacaagtcaagtcaagtctttgcctcatggagctaacattctaagaggagaaacatgcagtaaacaagtaaagaaatgtatgctctattcagggagtagtttgtgctatgaggaaaagcaaaacaggttgaagagatagctatgtggtgggagtgggactatttcgtacagggcactgattgtagacctctgatgagataacatttgacaagagatctgcagggagctatgtgtcatgggggaaggcattggagggttttgtgcaggacagtgatgtgtgatcagatttagtttaaaagaataatttgggctgggcatggtggttcctgcctgtaatcccagcactttgggagggtgaggtgggcgaatcacttgaatctgggagtttgataccagttcgggcaacatggcgaaatcccgtctctacaaaaaatacaaaaattagccagtgtggtggcacgcgcctgcagtcccagctacttgggaggctgaggtgggagaattgcttggatctgggaggtggaggttgcagtgaactcagattgcgccactgcactccagcctgagattgtgccactgcactccagccactgcactccaggaagaccctctcagaaaaaaaaaaaaaagaatttggccgttatgtggaggactggaattgagaagggcaagagcgaggtagaagagtggtctagggagaacagttaggggctattgcaattatccagcaagagatcttggaccaggatggcagcagtggaggtggtaaaatgtggttggatgaagcgtacgctttgaaggtatcaacaggaccagctgatggaagggagtcaacaggactagctgatggctgtaaactggggggtcactagctatcagatggcatttacttaaagccatggaagtaggtgagctcccttatggagagggaataggaaggaggtagaccattctatcaaaatgctctttctacagggcacttctcactgagatattatttatctgggatttatattatttattcaatttgttttgtgtttggttctattagaaaagctccatagg

SEQ ID NO: 344 - DNA, 253 bp, Homo sapien
atctggataacctccatcaatgtatttaacctcattcttagttttctcatcggaaagcagggatgatgatgataatgtgacgtcacacgattgagaaaggttataggtaaccacacgtcctgaacacccaactcggaatctggcccagcagacactcagatatgagtccccaagtatttgaatgtctactgtgagcctggaactgtcctggggactgtggactcaacagaaaaccacacccctgcctctagga

SEQ ID NO: 345 - DNA, 513 bp, Homo sapien
atctggataacctccatcaatgtatttaacctcattcttagttttctcatcggaaagcagggatgatgatgataatgtgacgtcacacgattgagaaaggttataggtaaccacacgtcctgaacacccaactcggaatctggcccagcagacactcagatatgagtccccaagtatttgaatgtctactgtgagcctggaactgtcctggggactgtggactcaacagaaaaccacacccctgcctctaggaggtttgcgttctagcgggcacgggcgagaccagctataaaccacatatggcgtcagttcccagaagagaaataaagcaggtacagaatgatggtgggggtgacggctctattctgggaggtatctggtgacatttgagcagagacttgatgggcccaggtggtggctatcactcgtgagagctttgggcatcattcctcccagcacatgctccagttacgtggaggcaggactggcatttgggtgattttcttggattgc

SEQ ID NO: 346 - DNA, 353 bp, Homo sapien
tcagtctcaaaaaaaaataaaataaaaaataaataggataaaatggtgatttaccaaagtccattgcaatttctcacatggagttctacttcaaggaagagctctttcctctcccaacgtgttttaggaccttaatacataatgacaaatagttttataaatagctgttaatgtagtgtcatccataatctgtgaatatcagcacatgatatcatgtaagttgctctttttttggctaattaaccgacaaaaagatgcactgttgctgttttaatttgcgtatctttaattacaattaaggctgaactttaaaaaatatatttactgaatttcactctctctagctttcacat

SEQ ID NO: 347 - DNA, 2111 bp, Homo sapien
caaagatgcttggagattgattgatgttgtaaagtgctttgatatctttcatagagtgttcaataagagcaaaatatgtcatcagaacttagtctaaagcaaactagtcccaaaccgtcttgagtagatactaagcggttttgtgtctttgttataagttgtacttatattttcgagagaaagtttttcatgttctgattttcttttaagtgtcagctgtatgtttggggtctttacctgttaacttgagttccaacatgctttgtagatggtcagtcacctacagaggacaatttttctagccaaggagttaaatccaccttaaaatgcttcttgccaaggacaatgcctttgcaaatatttgagatgtttattctcagttgtgatttattactgaatctgtgtcttcatagcgactccttgggaggtgcaggaggaggcagagccagaaagcaagtccctgcaatcagttcattatagagaaagaaaaagcttttatttcaggattctggtggatagacttactgatatgtatattctgtgtctatttaatttcacgtagtgctgcatctaatcacgctgtttaaataatcggacagaatgtccttttgctttgcttttgcttgtgaagagcacacagcactgccaccttgttgccaaagtttggtctgatttgaatgtgcttaaaaatcaagtgaatgcctgttgggaaaaagcttactccttctctttgtcagtacttgcaaaaacaacttaaaagaagttagtattattggactgaattcagtaattagcataatcatgatgctatgtattgttcaccagggcacgccccttggccgcatttcccattaagaggacaccgatgttgtcctagtgaataaatcccggcacacatgatgcaaatcagcgtgttcctgcctgctgcttggctgcagttaattttagccggggttagttctatgagttgtaaaagtagaagttagcaagctgaaatgtgacttctcggcctaatgtggtaggatatctattttagacttcagattgtgtttgtgatcaggagagcagtcttctgaagaattgtggctcagttttcttggaaactacttgtaagtactgggtggaattttaagacttctctttgttcttttctccttaaatcttcctaatgttaccgtcatagtaatgtttatctcttgggaaaactggaagctttcaggttggtacgttagagaaagctaagagaggtggcaaaaggtttttctttaaatgtctcctactgcaataaatctgccttattcaatttgcccaagaaaaagttttcgattcttacttatttttgcaaaagcaatctgtagattattattttatgttaaaatatttgattaatggatatggtttctgtaaatacagaaacattgtattgtgtcattgagctttgttttctactatggtaacctaattcttgagaaaaaaatgttgaaagttaattcctgttatactctgtgctacaagtttattttgtagaaataatggagtgtcaaatgtaattttcttgaatgtatagatggacagttttttatccttttaagggggattttgtgcttaaaaaataaacccatatatgcctaaagagaagcactttaaaaaattaatttaggaagaaggttttagagaataatttaaagcatcctcttttagactgagttagttatcaaaagtaaccaaaggccatgggattctgtaaccttaactgcagttcatctaacacattattaccaacttaaatttgtactgaagaaaacaaaagattttgatattgaatattttaaattaaatttgaatcatcttgcttatttagaagtgtgttttcaatgtggactgacctcaagccaaacagtttgcttacagcagagaaccaggcaggaatttctttatcaattagcaagtaaatgtatcagctttaggaatattgatattaataaaacagttctcctaggcgataggataggtgctcaccagctatctatgcctgtcatctctagagcaaggaaggaggcaggtccacagttagtattgtgaaagccattttcccattttgaaaagattta

SEQ ID NO: 348 - DNA, 723 bp, Homo sapien
gactatattgccataaattccccacgaggggtaattgctgatactgaccactgcggagtgctctgaaacctgcagctggacaagagagggctcctggtcatggtgtggaaagttggagctgcagggaggagccctgaagaccagtgaagaggaaatgggttccgggagtttcagggagtgatccacaggtggccagggtggggaggaccagaacccaggtggggaggaccagagccccggtctcatcacccaactctgcccagtatctgcagatacttctaaaatagctcaggtgagcctctgtatacagacaaactcaccagtctcaacaaagcgaaagtcactttgagatttttcctaggttcattcatttgtattattcaagaaaaactaattggtgtttgctgcttgggagcagagctctcagcaccaggaggaatatatgagccctcaaaacagacacagccacccacgtttctatttactcacaattttaagattccagccagtatgtttaaaagacaacgccaagcaaaggcaagtggcttcatgcttcaaacacccaggtcaggtggccctcacaagagtatctggagtggcccagcagcgtgtttcaaagctggggctccacgcatgaagaatcagcctcagtggaaagagtttgttttttccttttttgctaccatatacagaaatacttcaatttccacaaagtttctgtat

SEQ ID NO: 349 - DNA, 353 bp, Homo sapien
atgtgaaagctagagagagtgaaattcagtaaatatattttttaaagttcagccttaattgtaattaaagatacgcaaattaaaacagcaacagtgcatctttttgtcggttaattagccaaaaaaagagcaacttacatgatatcatgtgctgatattcacagattatggatgacactacattaacagctatttataaaactatttgtcattatgtattaaggtcctaaaacacgttgggagaggaaagagctcttccttgaagtagaactccatgtgagaaattgcaatggactttggtaaatcaccattttattttatttattttttattttatttttttttgagactga

SEQ ID NO: 350 - DNA, 1752 bp, Homo sapien
  misc_feature (3)..(3): n=a,c,g or t
ggntcactctagagtatcccctcagctcggacaaggcggggtaacgcaagaagcagctacacccgtctggctgctgttttatggaggagttggaatctgcacaggcctctgggtctgggggagaagagtgatccagaccatggggaaggacctcactcccatcacgccgtccagcggcttcacgatcgagctggcctcagccttcacagtggtgatcgcctccaacatcgggcttccagtcagcaccacgcactgtaaggtgggctcggtggtggccgtgggctggatccgctcccgcaaggctgtggactggcgcctctttcggaacatcttcgtggcctggttcgtgaccgtccctgtggctgggctgttcagcgctgctgtcatggctcttctcatgtatgggatccttccatatgtgtgatttgtcttcttccagctgcaaacagctaaagggatggtctggtgttggcgtgtgggagacatgtgtgctcgtgccgcacatacacatcctggccgtgcacggctctctcatgaccagctctctgcctcccttccaggaggctccatcccacactgttcacccaggctgcggagactcaccttcccgagctaacttaactactgtacataataatatgtattaaactggtatcgtggtgatataatgtggtgcagttacttatatattaaatatctattgtatccatagaataggcagcattatttcaaacatattcaagttgggagtggagatcattgcctagaagtcaatattcaataaatcttgtacataactatttcgatggcaaatgttaagccttctaaaaggaaagtgtagattggaaaatgattttttttccaaatgatgtttttgccttctaatatactgtaaggtaatgagcttcagaacaggcaacctgaccctgcagaggtcgcgtgctgtgggatgacagcgggacgggagctcacaagtgctttcactgaagatttgttcatatactgtgtattgattgttgtgtaatatatcatcattgcttttgtaaatacgtaaaactgtaattttttaatggtgtgcttcccttatacttttttgatcagagaattttggaaagtaccaaagaagcaggggaatcattggccagtgttacgttttcacattgtctgtctcccaccctcactgatcacgcctgccccagagcagtgtgtggcggtgacaccgtcacccagcatgcgccacgccgtggctcccaccagcagtgccaccgccaccacaccccagatcccacccaccttgcagtggcctttccttgtcatcagagtagagaatgcacaggtgttggtgagggcgtgtggctgagcactacatgtcaagtccagagtcagtttctatcccaattctccctgcagcctgaagaacggatccttgtctccaatgtcagcacaaaggaggctttttctgtgctttgacattctagcacttcagggatgagagggagggagaatcctggatgctggatggagtatttctctgaggcccacacaaagctggacacccccaggctctactccatcccattggagtctcttctttttttgatagcgggagggaggaagtacgactaatgttggagcctgaaactatggaaatgctgctaaaatttttatattgacaaacattttcttggtacttcattgtcatttttcattaatcaaccatattaaatttataataaaaaatgcccctcagaa

SEQ ID NO: 351 - DNA, 1733 bp, Homo sapien
gtacccgactgcatccaacgccgccataaaacagcagctacacccgtctggctgctgttttatggaggagttggaatctgcacaggcctctgggtctgggggagaagagtgatccagaccatggggaaggacctcactcccatcacgccgtccagcggcttcacgatcgagctggcctcagccttcacagtggtgatcgcctccaacatcgggcttccagtcagcaccacgcactgtaaggtgggctcggtggtggccgtgggctggatccgctcccgcaaggctgtggactggcgcctctttcggaacatcttcgtggcctggttcgtgaccgtccctgtggctgggctgttcagcgctgctgtcatggctcttctcatgtatgggatccttccatatgtgtgatttgtcttcttccagctgcaaacagctaaagggatggtctggtgttggcgtgtgggagacatgtgtgctcgtgccgcacatacacatcctggccgtgcacggctctctcatgaccagctctctgcctcccttccaggaggctccatcccacactgttcacccaggctgcggagactcaccttcccgagctaacttaactactgtacataataatatgtattaaactggtatcgtggtgatataatgtggtgcagttacttatatattaaatatctattgtatccatagaataggcagcattatttcaaacatattcaagttgggagtggagatcattgcctagaagtcaatattcaataaatcttgtacataactatttcgatggcaaatgttaagccttctaaaaggaaagtgtagattggaaaatgattttttttccaaatgatgtttttgccttctaatatactgtaaggtaatgagcttcagaacaggcaacctgaccctgcagaggtcgcgtgctgtgggatgacagcgggacgggagctcacaagtgctttcactgaagatttgttcatatactgtgtattgattgttgtgtaatatatcatcattgcttttgtaaatacgtaaaactgtaattttttaatggtgtgcttcccttatacttttttgatcagagaattttggaaagtaccaaagaagcaggggaatcattggccagtgttacgttttcacattgtctgtctcccaccctcactgatcacgcctgccccagagcagtgtgtggcggtgacaccgtcacccagcatgcgccacgccgtggctcccaccagcagtgccaccgccaccacaccccagatcccacccaccttgcagtggcctttccttgtcatcagagtagagaatgcacaggtgttggtgagggcgtgtggctgagcactacatgtcaagtccagagtcagtttctatcccaattctccctgcagcctgaagaacggatccttgtctccaatgtcagcacaaaggaggctttttctgtgctttgacattctagcacttcagggatgagagggagggagaatcctggatgctggatggagtatttctctgaggcccacacaaagctggacacccccaggctctactccatcccattggagtctcttctttttttgatagcgggagggaggaagtacgactaatgttggagcctgaaactatggaaatgctgctaaaatttttatattgacaaacattttcttggtacttcattgtcatttttcattaatcaaccatattaaatttataataaaaaatgcccctcagaa

SEQ ID NO: 352 - DNA, 1716 bp, Homo sapien
ctcaaaacaactatataaaacaactatataaagagctatatgctgaagagaagaatccccaaacaattctacctaaaatctaagctattttaaaagctttaacaaatgtaggggactgggtaatgttgtactagagcttgtttctgagattagcccatgtacattggtagagtgtagcctttgtggctcacctgtttttactttgcaatgtctgctcccacaggtgggctcggtggtggccgtgggctggatccgctcccgcaaggctgtggactggcgcctctttcggaacatcttcgtggcctggttcgtgaccgtccctgtggctgggctgttcagcgctgctgtcatggctcttctcatgtatgggatccttccatatgtgtgatttgtcttcttccagctgcaaacagctaaagggatggtctggtgttggcgtgtgggagacatgtgtgctcgtgccgcacatacacatcctggccgtgcacggctctctcatgaccagctctctgcctcccttccaggaggctccatcccacactgttcacccaggctgcggagactcaccttcccgagctaacttaactactgtacataataatatgtattaaactggtatcgtggtgatataatgtggtgcagttacttatatattaaatatctattgtatccatagaataggcagcattatttcaaacatattcaagttgggagtggagatcattgcctagaagtcaatattcaataaatcttgtacataactatttcgatggcaaatgttaagccttctaaaaggaaagtgtagattggaaaatgattttttttccaaatgatgtttttgccttctaatatactgtaaggtaatgagcttcagaacaggcaacctgaccctgcagaggtcgcgtgctgtgggatgacagcgggacgggagctcacaagtgctttcactgaagatttgttcatatactgtgtattgattgttgtgtaatatatcatcattgcttttgtaaatacgtaaaactgtaattttttaatggtgtgcttcccttatacttttttgatcagagaattttggaaagtaccaaagaagcaggggaatcattggccagtgttacgttttcacattgtctgtctcccaccctcactgatcacgcctgccccagagcagtgtgtggcggtgacaccgtcacccagcatgcgccacgccgtggctcccaccagcagtgccaccgccaccacaccccagatcccacccaccttgcagtggcctttccttgtcatcagagtagagaatgcacaggtgttggtgagggcgtgtggctgagcactacatgtcaagtccagagtcagtttctatcccaattctccctgcagcctgaagaacggatccttgtctccaatgtcagcacaaaggaggctttttctgtgctttgacattctagcacttcagggatgagagggagggagaatcctggatgctggatggagtatttctctgaggcccacacaaagctggacacccccaggctctactccatcccattggagtctcttctttttttgatagcgggagggaggaagtacgactaatgttggagcctgaaactatggaaatgctgctaaaatttttatattgacaaacattttcttggtacttcattgtcatttttcattaatcaaccatattaaatttataataaaaaatgcccctcagaa

SEQ ID NO: 353 - DNA, 6565 bp, Homo sapien
agccggagagacgcagcggcggccccagtgccgcccccgggcgcgtgagtggagccgggctcctttcccctaccgcgccgcgacccccgcccgggctgcgcgcgccgcctcccgcgagcccccggcccgactcccgggctcccgcgggtgggggccagggctggtcggcgccggcggggctcgcggcggcggcgggttgcgtcccccgcgcctgctggcccacgtggacctggccgtcgcttgccgtgcggcgcctttgcgaaaactcgacggaagtggcagggaccgggcattacctgcgagtgccgggcgcctcctgctccgctgtgcgcgcttggggtgggactcggcgggggaggggtcgtgtacattgtcccaccaggcgcaatgtagccgggcggcgcagaggatttcttttttggtcttgagagcatagagtcccttttcatattcacgtgtactcttaagaaagcgtctgttctccaaactggctttccattctccccgtcctaaatggtgcgtggctgacaccgtagtgttttcaaaactggatatggccaggatgctatagcattgtcagtgcatctccttggaaacaatgccatctttgaatgtgagagataaacctagtttcagcatgtctgcagcagagaccagtacatcaggcttattcccacaggaagcctcctaaagcctgtggcgcggcaaccatttccaggactaaataataatgtgtcagatgcctgtgagtggactgcctggccaaatgactcatgaagatattcacggaagaatagtcaaaaaccaaagaaaaggcatattctagaagcaccttcaattccatcgaggatttttgagcagctgaagaagaaagttctgaaaatatgagtgacaggactccagcacattttttttagttgtttcttacattatctttgttaacccatccgcttttgtgtataatattaagttattttccactactgcaatggctagtaatttacttaggctcagagttttactctgtatggacagagaaataggaggtaacaacagtgggagaacaaataggaacagttcactgggatgttggtccccagaaattggctttcattgaataattcctaaagggtgtcgtgtgctgaattgctttttcatagtgatgtgctgcttcttgttcatactcttatgactttaatttcacctttatctactcccagcctctgtatatgcctacgtttttaaaaataatttttggcactgaagatctgattaccatattttttcagtttaaaaattaaatcctcgcaaatagacctttggtatagttgcattctaccctaggttattttctaggatcaagaatagaacaatttctgttctttccagcattactctttactattcatatgttcttgttcagtgttttgttgttctcatattctaggtggaaatgaagggtaatctctatgttctattttcagttttctaggaaaccagaaaaacatgggtagtagaaatgtatagaaaatgtatgaggtctcttaaccattgtgttaaacttgcattaagcttcttttttagcaatatcgatgtcagtgttacctcttctttcctttttatttattttttttgagacagagtctcattctgtcgcccagactggttggagtgcgatgatgcgatcgcggctaactgcaaccgctgcctcccgggtacaagtgattctcgtgccttgggctcccgagtagctgggatttttagtggagaacaggtttcaccatattggccaggctggtcttgaactcgcaacctcaggtgatccacccacctcagcctccccaargtgttgggattacaggcatgagccaccatacctggccccttttgttgttttgaggggcaggcagtaagaagcagggatttcttcaaatgctagtaagcacaaagagagagagggagaagtttttgtaagtaacgaacagggccgggcatggtggcgtgagaggccgaggtgggcagatcacgaggtcaggagttcgagaccagcctgaccaacatggtgaaacccccgtctccactagaaatgcaaagattagccgggcatggtggtgcacgcctgtaatccagctagtcgggaggctgaggcaggagaatcgcttgaacctgggaggtggaggttgcagggagctgagatcacgccactgcactccagcctgggcgacagagtaagactcccgtctcaaaaaaaaaaaaaaaaaaaaaagaacagttgatcattaaggccattaatgtgcatggacagtttgttgcccaggttggagtgtgatgacgacgcaatctcggtaaatataaacctactctgtaacctccacctcctgggctcargcrgttctcgtgcttcagcctcccgagtagctgggatcacaggcatgcgccactaagcccagctaatttttgtatttttagtrgagacggggtttcaccatgttggccaggctggtcttgaactcctggcctcaagtgatgcgcctgcctgggcctcccaaagtgctgggattacaggtgtgagccactgcgcctggcccaataggcacatttttttaataagtagtttgttgattagaacgaagagcacttgccgtaagtgcatgtcattgttttcagctgttatggctaagtcagttaacctcatcaacaattttttcttctgtaaattgaggacaatttttgcttttatgaatgaagtcttaaccagcaggaagaaatataaacaaaggaacatatttttaatttaatgaagcaaaattccatacatcattttgaaaatagtgtttctttccctgataggcctgttctgcatcattcttttagcttccttctgccctgtttatcacttggtcccacttttatatttttcctcttcggtccagaatttcttatttagtttcttgtattttgcctactccctcccttctccatgattcagcctagtctttccgtcctctgtggacttgggtgtgccttcctctgggccacctcgtcttttgctgctgttagccctcccgcctgcgcacctgccacttcaccctcgcctgtggtccacttacgttccactcagcccggtcagtcctgctttgttcttctccaccgccttggtctcccgtgtgtcttatctagctctggttccttctcgtctccacatttattttgttttcttcctgtgcttgttagtccttgtgcacttggtccttgagctctttttctattaataggtattactagatggatttgttgtctgcctttacatagaacacacatccttactgtgcatttcctgggtagccaggatgaatcaattattattaacttcccttcgaacattgagcttcctctgttttctgtttctaagaattagattagtattctagaagactaatactactttaaagacagtcaaaacagtcatacgctgccatttcagccctttatttaagagtttgtgacatttatcactcccttgaaagattaaagaacacccaaagcaagtttggggtggaggtggggaaggcaggaagagaaaggtaagtgctataaaaggactcattgttaatttctagaaattggactgagatctgaaagcataagccttaacattttttagataaacggtccctgaaaagaataaaaagtatcagtacttccgttaactagctttagtattgggtcatttgtagtttacattctcctttaagttttaagaccttcagtagttaacaaagcagacagagactggccaggcacagtggctcacacctgtaataccagcactttgggaggctgagttgggtggatcacaaggtcaggagattgaaaccatcctggccaacatggtgaaaccccgtctctactaaaaatacaaaaaaaaaaaaaaattagccaggcgtggtggcaggcacctgtggtcccagctactcgggaggctggggcaggagaatttcttgagcccgggaggccgaggttgcagtgagctgagatcgcgccactgcactccagcctgggtgacagcgagactctgtctcaaaaagaaaaaaaaaaaaaaaagcagagacttaatcttgtaaatactcattttatttttgagaggcttaatgtctccttaaatattaacctgtgtcattttgtaattatactgtaatagtgtcagaatgccattaacaaccaacccttttcgtttcttgtgtgggaaagctcataaattgtgtggtcttacccctctggaccctgtagttgtagcattgtgaaaatggagcttttggcaaaactttgtattatgctgttgactcacattgtctcatatttttcctttattcttctatattctatgaatatggtgctgtcctgtcatttaattattataatatatgtgaactgctggaggtagactgatgtgagtgcagtttttcaacttaaaaacccttatatatcacattcatggtgtttaagatataagaacagccctacaaagaggggttgattgtattgaagattctttctgctgagcctgccttaattgtgagggtggttgtttgggtatcttagagctaaaagaatggctaagagtccattaatggtcctgtaatattcaccatccctgagcagttagtaaagaatggccgcaaagccacaattaggctactaacaaggaacttatgtagatgtgctaggtccagcctgtgttctggaactatagagatgaataaggtatggtcctttctctctggaggctcacagttgaatagggaatattaatacgtgaatgatagcagtacagtgtggcagatgctaaaatatatgtgtgtagcagctattacaggagaactgattaatagggagagtctggctgggctcagtgactcacccctgtaatcccagcactttgggaggccgaggcgggcagatcacttgaggtcaggagttcgagaccagcctggccaacatggtaaaacctcatctctactaaaaaatacaaagaaaattagcaaggcgtggtggcgggcatctgtaatcccagctactggggaggctgaagcaggagaatcccttgaacccgggaggtgaggttgcagtgagctgagatcatgccactgcactccagcctgggtgacagagtaagactgtctcaaaaacaaaacccaaaatactaaccatatttatagttagtcacctcaccctttttttagttaaaagaagtttatttagcctgatcagtttaccagatgtcttttttagtgacttttgtgtcttccataaatccattctcaaaatttgcaacagttgagcatatttgaccaaaatgtgccacaggtttctgaagcctgttcaagaagaagcatgtcaacattattggagtaggtcttcgcaatgactacttttgggaagatttgagtaaaatttatggatacagaagttttggagtatgttagaatattactaagtctttttatagttgtaatcccaacactgggttatatatatttaataccaacctgagtatatttcctgaataatatctgttttggagacttggacaaagttaacttttttgcttttttaaaagttgctgtttaaattaacttcctgcatttctaatgtagaaaaaatatggcacagtgatttgaattttgtttatggtttattatcttcctaaattatcagctctttaaaatatgggtctctggcctgtataccatctgataaattaggttgggtaaatttttcacctgaaaaaattcattcttttgacccaggttgtttggcttggaaaaaaaaaatcacatactcattgcatgattaaacttgtccatcagattgtgattttgtgcgttatgaggattgtagctggggtaattttaaaatgttggtatttggatagaactgccagcccaggattttgataaagatcaaaatatatactgtatctaaagtttcttttttaaaagttatttcacttataatcaaaaggtttaaataagtttagtgtatattttatgattagtattattttgtatcgattcagagagaggaaaactgcattcccatagacagggagacttggtgcattaatatccaaagcttagtttaagctggtgatgattagaaaagtggctttcatttgtgttctctggaagattctcagtagtcctgtgggcatgtgaacaagagcatgtgtaatcttcataatgtatgtcttgttagcagaaatgtctgaggcattgctgagatgtaggatgagctgaggtactggttttgtctttcatggttccctattatgttttttgagaaactgagcttttcctgacagtgtttagtttttcttggctatttactatgctattaatagtaacagtttccattatggagcctcagtaggttcttgacatacattaacccattgctattatgtaattttctaataaaatgatgtgataaaacatattttctgtaatatactcatagaatatgtgattataagtaaataaatagatgttggggtagtcctcca

SEQ ID NO: 354 - DNA, 1785 bp, Homo sapien
gactatattgccataaattccccacgaggggtaattgctgatactgaccactgcggagtgctctgaaacctgcagctggacaagagagggctcctggtcatggtgtggaaagttggagctgcagggaggagccctgaagaccagtgaagaggaaatgggttccgggagtttcagggagtgatccacaggtggccagggtggggaggaccagaacccaggtggggaggaccagagccccggtctcatcacccaactctgcccagtatctgcagatacttctaaaatagctcaggtgggctcggtggtggccgtgggctggatccgctcccgcaaggctgtggactggcgcctctttcggaacatcttcgtggcctggttcgtgaccgtccctgtggctgggctgttcagcgctgctgtcatggctcttctcatgtatgggatccttccatatgtgtgatttgtcttcttccagctgcaaacagctaaagggatggtctggtgttggcgtgtgggagacatgtgtgctcgtgccgcacatacacatcctggccgtgcacggctctctcatgaccagctctctgcctcccttccaggaggctccatcccacactgttcacccaggctgcggagactcaccttcccgagctaacttaactactgtacataataatatgtattaaactggtatcgtggtgatataatgtggtgcagttacttatatattaaatatctattgtatccatagaataggcagcattatttcaaacatattcaagttgggagtggagatcattgcctagaagtcaatattcaataaatcttgtacataactatttcgatggcaaatgttaagccttctaaaaggaaagtgtagattggaaaatgattttttttccaaatgatgtttttgccttctaatatactgtaaggtaatgagcttcagaacaggcaacctgaccctgcagaggtcgcgtgctgtgggatgacagcgggacgggagctcacaagtgctttcactgaagatttgttcatatactgtgtattgattgttgtgtaatatatcatcattgcttttgtaaatacgtaaaactgtaattttttaatggtgtgcttcccttatacttttttgatcagagaattttggaaagtaccaaagaagcaggggaatcattggccagtgttacgttttcacattgtctgtctcccaccctcactgatcacgcctgccccagagcagtgtgtggcggtgacaccgtcacccagcatgcgccacgccgtggctcccaccagcagtgccaccgccaccacaccccagatcccacccaccttgcagtggcctttccttgtcatcagagtagagaatgcacaggtgttggtgagggcgtgtggctgagcactacatgtcaagtccagagtcagtttctatcccaattctccctgcagcctgaagaacggatccttgtctccaatgtcagcacaaaggaggctttttctgtgctttgacattctagcacttcagggatgagagggagggagaatcctggatgctggatggagtatttctctgaggcccacacaaagctggacacccccaggctctactccatcccattggagtctcttctttttttgatagcgggagggaggaagtacgactaatgttggagcctgaaactatggaaatgctgctaaaatttttatattgacaaacattttcttggtacttcattgtcatttttcattaatcaaccatattaaatttataataaaaaatgcccctcagaa

SEQ ID NO: 355 - DNA, 1792 bp, Homo sapien
atgtgaaagctagagagagtgaaattcagtaaatatattttttaaagttcagccttaattgtaattaaagatacgcaaattaaaacagcaacagtgcatctttttgtcggttaattagccaaaaaaagagcaacttacatgatatcatgtgctgatattcacagattatggatgacactacattaacagctatttataaaactatttgtcattatgtattaaggtcctaaaacacgttgggagaggaaagagctcttccttgaagtagaactccatgtgagaaattgcaatggactttggtgggctcggtggtggccgtgggctggatccgctcccgcaaggctgtggactggcgcctctttcggaacatcttcgtggcctggttcgtgaccgtccctgtggctgggctgttcagcgctgctgtcatggctcttctcatgtatgggatccttccatatgtgtgatttgtcttcttccagctgcaaacagctaaagggatggtctggtgttggcgtgtgggagacatgtgtgctcgtgccgcacatacacatcctggccgtgcacggctctctcatgaccagctctctgcctcccttccaggaggctccatcccacactgttcacccaggctgcggagactcaccttcccgagctaacttaactactgtacataataatatgtattaaactggtatcgtggtgatataatgtggtgcagttacttatatattaaatatctattgtatccatagaataggcagcattatttcaaacatattcaagttgggagtggagatcattgcctagaagtcaatattcaataaatcttgtacataactatttcgatggcaaatgttaagccttctaaaaggaaagtgtagattggaaaatgattttttttccaaatgatgtttttgccttctaatatactgtaaggtaatgagcttcagaacaggcaacctgaccctgcagaggtcgcgtgctgtgggatgacagcgggacgggagctcacaagtgctttcactgaagatttgttcatatactgtgtattgattgttgtgtaatatatcatcattgcttttgtaaatacgtaaaactgtaattttttaatggtgtgcttcccttatacttttttgatcagagaattttggaaagtaccaaagaagcaggggaatcattggccagtgttacgttttcacattgtctgtctcccaccctcactgatcacgcctgccccagagcagtgtgtggcggtgacaccgtcacccagcatgcgccacgccgtggctcccaccagcagtgccaccgccaccacaccccagatcccacccaccttgcagtggcctttccttgtcatcagagtagagaatgcacaggtgttggtgagggcgtgtggctgagcactacatgtcaagtccagagtcagtttctatcccaattctccctgcagcctgaagaacggatccttgtctccaatgtcagcacaaaggaggctttttctgtgctttgacattctagcacttcagggatgagagggagggagaatcctggatgctggatggagtatttctctgaggcccacacaaagctggacacccccaggctctactccatcccattggagtctcttctttttttgatagcgggagggaggaagtacgactaatgttggagcctgaaactatggaaatgctgctaaaatttttatattgacaaacattttcttggtacttcattgtcatttttcattaatcaaccatattaaatttataataaaaaatgcccctcagaa

SEQ ID NO: 356 - DNA, 1651 bp, Homo sapien
gcgtcctcctccccggctccgcctggcaagcatggggaaggaaggcaggaagaggtgcaggtgtgcccgccacccattcattgtcctaaaacacgttgggagaggaaagagctcttccttgaagtagaactccatgtgagaaattgcaatggactttggtgggctcggtggtggccgtgggctggatccgctcccgcaaggctgtggactggcgcctctttcggaacatcttcgtggcctggttcgtgaccgtccctgtggctgggctgttcagcgctgctgtcatggctcttctcatgtatgggatccttccatatgtgtgatttgtcttcttccagctgcaaacagctaaagggatggtctggtgttggcgtgtgggagacatgtgtgctcgtgccgcacatacacatcctggccgtgcacggctctctcatgaccagctctctgcctcccttccaggaggctccatcccacactgttcacccaggctgcggagactcaccttcccgagctaacttaactactgtacataataatatgtattaaactggtatcgtggtgatataatgtggtgcagttacttatatattaaatatctattgtatccatagaataggcagcattatttcaaacatattcaagttgggagtggagatcattgcctagaagtcaatattcaataaatcttgtacataactatttcgatggcaaatgttaagccttctaaaaggaaagtgtagattggaaaatgattttttttccaaatgatgtttttgccttctaatatactgtaaggtaatgagcttcagaacaggcaacctgaccctgcagaggtcgcgtgctgtgggatgacagcgggacgggagctcacaagtgctttcactgaagatttgttcatatactgtgtattgattgttgtgtaatatatcatcattgcttttgtaaatacgtaaaactgtaattttttaatggtgtgcttcccttatacttttttgatcagagaattttggaaagtaccaaagaagcaggggaatcattggccagtgttacgttttcacattgtctgtctcccaccctcactgatcacgcctgccccagagcagtgtgtggcggtgacaccgtcacccagcatgcgccacgccgtggctcccaccagcagtgccaccgccaccacaccccagatcccacccaccttgcagtggcctttccttgtcatcagagtagagaatgcacaggtgttggtgagggcgtgtggctgagcactacatgtcaagtccagagtcagtttctatcccaattctccctgcagcctgaagaacggatccttgtctccaatgtcagcacaaaggaggctttttctgtgctttgacattctagcacttcagggatgagagggagggagaatcctggatgctggatggagtatttctctgaggcccacacaaagctggacacccccaggctctactccatcccattggagtctcttctttttttgatagcgggagggaggaagtacgactaatgttggagcctgaaactatggaaatgctgctaaaatttttatattgacaaacattttcttggtacttcattgtcatttttcattaatcaaccatattaaatttataataaaaaatgcccctcagaa

SEQ ID NO: 357 - DNA, 7242 bp, Homo sapien
caagatgaagaacagtggtatttctctgaaagtcccagtatgtctcccttttgttgggagctgacagtatgatttggggggcatcgggcatcaacagtcactgaatctaaatggctccacagataggggagtgtatacatcaccacaccagctgtccaggaattaggaggaagtgcccttgaatgaagcctgggctgcaagcctggttagcagccagggaggacacacacacgttgcaggtacagtattctgtattacacagattgtttctactgggaaggatatcatatcatttatcttgggggtagcttcagaatttgagtcagtgatgaaatgacttgctgctttcgttatgctcccttaagaagaacatcatatatttcgggatggcctgcataaaagaaacttgtaataatgaatattgacctataccttgtgttctgtttaagtatctgaggaagtaatttggaaaacttgagttaaaatagtctatattgtagtttttatccaatttgcacgttagccctaatcttcatttcagactcttccctgaatgggaaacttttagggaaagagagaatgatacactgattaatttattttcagcctacgaagctaggataatttaatgaaatctctaccagtcccatgttatgaattttagggttggagagctggattctggacgtgatctattctttaactaggaatgtacagcagaatgacccagggtttatcctgaaagtagcagatgtcttcacttaactcctgagacgcaaatttggtagagctgctgccacaggccccggacatcagtattaaaccatccttaagtgattctggtgccttttctccagtaagaagaaccagccctgtattttatatttaagaaaacctgggcaaacaaatgacttgcctagatttggttcagtggtaccaagatttagtcaccagataatacagtttcagaatcctatggctggaagaagtttaccaagtcatcaattcagtagttcatcttacagcggagtgtaaaccatgcttttcaattatttgcggttcttttactgtataccctgtgatgcccttttaagtttttttgaaaatattgtatacttaaaactgaagtgaaacattaaaatttcttattagaattatttttcagtcttagctgaaatacaatattgtatgaaaatttgcactgcattattagtttttttttttaatctagttgattttcaacttttcttttttaaaggcatctccttggaaacaatgccatctttgaatgtgagagataaacctagtttcagcatgtctgcagcagagaccagtacatcaggcttattcccacaggaagcctcctaaagcctgtggcgcggcaaccatttccaggactaaataataatgtgtcagatgcctgtgagtggactgcctggccaaatgactcatgaagatattcacggaagaatagtcaaaaaccaaagaaaaggcatattctagaagcaccttcaattccatcgaggatttttgagcagctgaagaagaaagttctgaaaatatgagtgacaggactccagcacattttttttagttgtttcttacattatctttgttaacccatccgcttttgtgtataatattaagttattttccactactgcaatggctagtaatttacttaggctcagagttttactctgtatggacagagaaataggaggtaacaacagtgggagaacaaataggaacagttcactgggatgttggtccccagaaattggctttcattgaataattcctaaagggtgtcgtgtgctgaattgctttttcatagtgatgtgctgcttcttgttcatactcttatgactttaatttcacctttatctactcccagcctctgtatatgcctacgtttttaaaaataatttttggcactgaagatctgattaccatattttttcagtttaaaaattaaatcctcgcaaatagacctttggtatagttgcattctaccctaggttattttctaggatcaagaatagaacaatttctgttctttccagcattactctttactattcatatgttcttgttcagtgttttgttgttctcatattctaggtggaaatgaagggtaatctctatgttctattttcagttttctaggaaaccagaaaaacatgggtagtagaaatgtatagaaaatgtatgaggtctcttaaccattgtgttaaacttgcattaagcttcttttttagcaatatcgatgtcagtgttacctcttctttcctttttatttattttttttgagacagagtctcattctgtcgcccagactggttggagtgcgatgatgcgatcgcggctaactgcaaccgctgcctcccgggtacaagtgattctcgtgccttgggctcccgagtagctgggatttttagtggagaacaggtttcaccatattggccaggctggtcttgaactcgcaacctcaggtgatccacccacctcagcctccccaargtgttgggattacaggcatgagccaccatacctggccccttttgttgttttgaggggcaggcagtaagaagcagggatttcttcaaatgctagtaagcacaaagagagagagggagaagtttttgtaagtaacgaacagggccgggcatggtggcgtgagaggccgaggtgggcagatcacgaggtcaggagttcgagaccagcctgaccaacatggtgaaacccccgtctccactagaaatgcaaagattagccgggcatggtggtgcacgcctgtaatccagctagtcgggaggctgaggcaggagaatcgcttgaacctgggaggtggaggttgcagggagctgagatcacgccactgcactccagcctgggcgacagagtaagactcccgtctcaaaaaaaaaaaaaaaaaaaaaagaacagttgatcattaaggccattaatgtgcatggacagtttgttgcccaggttggagtgtgatgacgacgcaatctcggtaaatataaacctactctgtaacctccacctcctgggctcargcrgttctcgtgcttcagcctcccgagtagctgggatcacaggcatgcgccactaagcccagctaatttttgtatttttagtrgagacggggtttcaccatgttggccaggctggtcttgaactcctggcctcaagtgatgcgcctgcctgggcctcccaaagtgctgggattacaggtgtgagccactgcgcctggcccaataggcacatttttttaataagtagtttgttgattagaacgaagagcacttgccgtaagtgcatgtcattgttttcagctgttatggctaagtcagttaacctcatcaacaattttttcttctgtaaattgaggacaatttttgcttttatgaatgaagtcttaaccagcaggaagaaatataaacaaaggaacatatttttaatttaatgaagcaaaattccatacatcattttgaaaatagtgtttctttccctgataggcctgttctgcatcattcttttagcttccttctgccctgtttatcacttggtcccacttttatatttttcctcttcggtccagaatttcttatttagtttcttgtattttgcctactccctcccttctccatgattcagcctagtctttccgtcctctgtggacttgggtgtgccttcctctgggccacctcgtcttttgctgctgttagccctcccgcctgcgcacctgccacttcaccctcgcctgtggtccacttacgttccactcagcccggtcagtcctgctttgttcttctccaccgccttggtctcccgtgtgtcttatctagctctggttccttctcgtctccacatttattttgttttcttcctgtgcttgttagtccttgtgcacttggtccttgagctctttttctattaataggtattactagatggatttgttgtctgcctttacatagaacacacatccttactgtgcatttcctgggtagccaggatgaatcaattattattaacttcccttcgaacattgagcttcctctgttttctgtttctaagaattagattagtattctagaagactaatactactttaaagacagtcaaaacagtcatacgctgccatttcagccctttatttaagagtttgtgacatttatcactcccttgaaagattaaagaacacccaaagcaagtttggggtggaggtggggaaggcaggaagagaaaggtaagtgctataaaaggactcattgttaatttctagaaattggactgagatctgaaagcataagccttaacattttttagataaacggtccctgaaaagaataaaaagtatcagtacttccgttaactagctttagtattgggtcatttgtagtttacattctcctttaagttttaagaccttcagtagttaacaaagcagacagagactggccaggcacagtggctcacacctgtaataccagcactttgggaggctgagttgggtggatcacaaggtcaggagattgaaaccatcctggccaacatggtgaaaccccgtctctactaaaaatacaaaaaaaaaaaaaaattagccaggcgtggtggcaggcacctgtggtcccagctactcgggaggctggggcaggagaatttcttgagcccgggaggccgaggttgcagtgagctgagatcgcgccactgcactccagcctgggtgacagcgagactctgtctcaaaaagaaaaaaaaaaaaaaaagcagagacttaatcttgtaaatactcattttatttttgagaggcttaatgtctccttaaatattaacctgtgtcattttgtaattatactgtaatagtgtcagaatgccattaacaaccaacccttttcgtttcttgtgtgggaaagctcataaattgtgtggtcttacccctctggaccctgtagttgtagcattgtgaaaatggagcttttggcaaaactttgtattatgctgttgactcacattgtctcatatttttcctttattcttctatattctatgaatatggtgctgtcctgtcatttaattattataatatatgtgaactgctggaggtagactgatgtgagtgcagtttttcaacttaaaaacccttatatatcacattcatggtgtttaagatataagaacagccctacaaagaggggttgattgtattgaagattctttctgctgagcctgccttaattgtgagggtggttgtttgggtatcttagagctaaaagaatggctaagagtccattaatggtcctgtaatattcaccatccctgagcagttagtaaagaatggccgcaaagccacaattaggctactaacaaggaacttatgtagatgtgctaggtccagcctgtgttctggaactatagagatgaataaggtatggtcctttctctctggaggctcacagttgaatagggaatattaatacgtgaatgatagcagtacagtgtggcagatgctaaaatatatgtgtgtagcagctattacaggagaactgattaatagggagagtctggctgggctcagtgactcacccctgtaatcccagcactttgggaggccgaggcgggcagatcacttgaggtcaggagttcgagaccagcctggccaacatggtaaaacctcatctctactaaaaaatacaaagaaaattagcaaggcgtggtggcgggcatctgtaatcccagctactggggaggctgaagcaggagaatcccttgaacccgggaggtgaggttgcagtgagctgagatcatgccactgcactccagcctgggtgacagagtaagactgtctcaaaaacaaaacccaaaatactaaccatatttatagttagtcacctcaccctttttttagttaaaagaagtttatttagcctgatcagtttaccagatgtcttttttagtgacttttgtgtcttccataaatccattctcaaaatttgcaacagttgagcatatttgaccaaaatgtgccacaggtttctgaagcctgttcaagaagaagcatgtcaacattattggagtaggtcttcgcaatgactacttttgggaagatttgagtaaaatttatggatacagaagttttggagtatgttagaatattactaagtctttttatagttgtaatcccaacactgggttatatatatttaataccaacctgagtatatttcctgaataatatctgttttggagacttggacaaagttaacttttttgcttttttaaaagttgctgtttaaattaacttcctgcatttctaatgtagaaaaaatatggcacagtgatttgaattttgtttatggtttattatcttcctaaattatcagctctttaaaatatgggtctctggcctgtataccatctgataaattaggttgggtaaatttttcacctgaaaaaattcattcttttgacccaggttgtttggcttggaaaaaaaaaatcacatactcattgcatgattaaacttgtccatcagattgtgattttgtgcgttatgaggattgtagctggggtaattttaaaatgttggtatttggatagaactgccagcccaggattttgataaagatcaaaatatatactgtatctaaagtttcttttttaaaagttatttcacttataatcaaaaggtttaaataagtttagtgtatattttatgattagtattattttgtatcgattcagagagaggaaaactgcattcccatagacagggagacttggtgcattaatatccaaagcttagtttaagctggtgatgattagaaaagtggctttcatttgtgttctctggaagattctcagtagtcctgtgggcatgtgaacaagagcatgtgtaatcttcataatgtatgtcttgttagcagaaatgtctgaggcattgctgagatgtaggatgagctgaggtactggttttgtctttcatggttccctattatgttttttgagaaactgagcttttcctgacagtgtttagtttttcttggctatttactatgctattaatagtaacagtttccattatggagcctcagtaggttcttgacatacattaacccattgctattatgtaattttctaataaaatgatgtgataaaacatattttctgtaatatactcatagaatatgtgattataagtaaataaatagatgttggggtagtcctcca

SEQ ID NO: 358 - DNA, 6242 bp, Homo sapien
tcagctcggtaccctctctccacactgggggggaggggtcgtgtacattgtcccaccaggcgcaatgtagccgggcggcgcagaggatttcttttttggtcttgagagcatagagtcccttttcatattcacgtgtactcttaagaaagcgtctgttctccaaactggctttccattctccccgtcctaaatggtgcgtggctgacaccgtagtgttttcaaaactggatatggccaggatgctatagcattgtcagtgcatctccttggaaacaatgccatctttgaatgtgagagataaacctagtttcagcatgtctgcagcagagaccagtacatcaggcttattcccacaggaagcctcctaaagcctgtggcgcggcaaccatttccaggactaaataataatgtgtcagatgcctgtgagtggactgcctggccaaatgactcatgaagatattcacggaagaatagtcaaaaaccaaagaaaaggcatattctagaagcaccttcaattccatcgaggatttttgagcagctgaagaagaaagttctgaaaatatgagtgacaggactccagcacattttttttagttgtttcttacattatctttgttaacccatccgcttttgtgtataatattaagttattttccactactgcaatggctagtaatttacttaggctcagagttttactctgtatggacagagaaataggaggtaacaacagtgggagaacaaataggaacagttcactgggatgttggtccccagaaattggctttcattgaataattcctaaagggtgtcgtgtgctgaattgctttttcatagtgatgtgctgcttcttgttcatactcttatgactttaatttcacctttatctactcccagcctctgtatatgcctacgtttttaaaaataatttttggcactgaagatctgattaccatattttttcagtttaaaaattaaatcctcgcaaatagacctttggtatagttgcattctaccctaggttattttctaggatcaagaatagaacaatttctgttctttccagcattactctttactattcatatgttcttgttcagtgttttgttgttctcatattctaggtggaaatgaagggtaatctctatgttctattttcagttttctaggaaaccagaaaaacatgggtagtagaaatgtatagaaaatgtatgaggtctcttaaccattgtgttaaacttgcattaagcttcttttttagcaatatcgatgtcagtgttacctcttctttcctttttatttattttttttgagacagagtctcattctgtcgcccagactggttggagtgcgatgatgcgatcgcggctaactgcaaccgctgcctcccgggtacaagtgattctcgtgccttgggctcccgagtagctgggatttttagtggagaacaggtttcaccatattggccaggctggtcttgaactcgcaacctcaggtgatccacccacctcagcctccccaargtgttgggattacaggcatgagccaccatacctggccccttttgttgttttgaggggcaggcagtaagaagcagggatttcttcaaatgctagtaagcacaaagagagagagggagaagtttttgtaagtaacgaacagggccgggcatggtggcgtgagaggccgaggtgggcagatcacgaggtcaggagttcgagaccagcctgaccaacatggtgaaacccccgtctccactagaaatgcaaagattagccgggcatggtggtgcacgcctgtaatccagctagtcgggaggctgaggcaggagaatcgcttgaacctgggaggtggaggttgcagggagctgagatcacgccactgcactccagcctgggcgacagagtaagactcccgtctcaaaaaaaaaaaaaaaaaaaaaagaacagttgatcattaaggccattaatgtgcatggacagtttgttgcccaggttggagtgtgatgacgacgcaatctcggtaaatataaacctactctgtaacctccacctcctgggctcargcrgttctcgtgcttcagcctcccgagtagctgggatcacaggcatgcgccactaagcccagctaatttttgtatttttagtrgagacggggtttcaccatgttggccaggctggtcttgaactcctggcctcaagtgatgcgcctgcctgggcctcccaaagtgctgggattacaggtgtgagccactgcgcctggcccaataggcacatttttttaataagtagtttgttgattagaacgaagagcacttgccgtaagtgcatgtcattgttttcagctgttatggctaagtcagttaacctcatcaacaattttttcttctgtaaattgaggacaatttttgcttttatgaatgaagtcttaaccagcaggaagaaatataaacaaaggaacatatttttaatttaatgaagcaaaattccatacatcattttgaaaatagtgtttctttccctgataggcctgttctgcatcattcttttagcttccttctgccctgtttatcacttggtcccacttttatatttttcctcttcggtccagaatttcttatttagtttcttgtattttgcctactccctcccttctccatgattcagcctagtctttccgtcctctgtggacttgggtgtgccttcctctgggccacctcgtcttttgctgctgttagccctcccgcctgcgcacctgccacttcaccctcgcctgtggtccacttacgttccactcagcccggtcagtcctgctttgttcttctccaccgccttggtctcccgtgtgtcttatctagctctggttccttctcgtctccacatttattttgttttcttcctgtgcttgttagtccttgtgcacttggtccttgagctctttttctattaataggtattactagatggatttgttgtctgcctttacatagaacacacatccttactgtgcatttcctgggtagccaggatgaatcaattattattaacttcccttcgaacattgagcttcctctgttttctgtttctaagaattagattagtattctagaagactaatactactttaaagacagtcaaaacagtcatacgctgccatttcagccctttatttaagagtttgtgacatttatcactcccttgaaagattaaagaacacccaaagcaagtttggggtggaggtggggaaggcaggaagagaaaggtaagtgctataaaaggactcattgttaatttctagaaattggactgagatctgaaagcataagccttaacattttttagataaacggtccctgaaaagaataaaaagtatcagtacttccgttaactagctttagtattgggtcatttgtagtttacattctcctttaagttttaagaccttcagtagttaacaaagcagacagagactggccaggcacagtggctcacacctgtaataccagcactttgggaggctgagttgggtggatcacaaggtcaggagattgaaaccatcctggccaacatggtgaaaccccgtctctactaaaaatacaaaaaaaaaaaaaaattagccaggcgtggtggcaggcacctgtggtcccagctactcgggaggctggggcaggagaatttcttgagcccgggaggccgaggttgcagtgagctgagatcgcgccactgcactccagcctgggtgacagcgagactctgtctcaaaaagaaaaaaaaaaaaaaaagcagagacttaatcttgtaaatactcattttatttttgagaggcttaatgtctccttaaatattaacctgtgtcattttgtaattatactgtaatagtgtcagaatgccattaacaaccaacccttttcgtttcttgtgtgggaaagctcataaattgtgtggtcttacccctctggaccctgtagttgtagcattgtgaaaatggagcttttggcaaaactttgtattatgctgttgactcacattgtctcatatttttcctttattcttctatattctatgaatatggtgctgtcctgtcatttaattattataatatatgtgaactgctggaggtagactgatgtgagtgcagtttttcaacttaaaaacccttatatatcacattcatggtgtttaagatataagaacagccctacaaagaggggttgattgtattgaagattctttctgctgagcctgccttaattgtgagggtggttgtttgggtatcttagagctaaaagaatggctaagagtccattaatggtcctgtaatattcaccatccctgagcagttagtaaagaatggccgcaaagccacaattaggctactaacaaggaacttatgtagatgtgctaggtccagcctgtgttctggaactatagagatgaataaggtatggtcctttctctctggaggctcacagttgaatagggaatattaatacgtgaatgatagcagtacagtgtggcagatgctaaaatatatgtgtgtagcagctattacaggagaactgattaatagggagagtctggctgggctcagtgactcacccctgtaatcccagcactttgggaggccgaggcgggcagatcacttgaggtcaggagttcgagaccagcctggccaacatggtaaaacctcatctctactaaaaaatacaaagaaaattagcaaggcgtggtggcgggcatctgtaatcccagctactggggaggctgaagcaggagaatcccttgaacccgggaggtgaggttgcagtgagctgagatcatgccactgcactccagcctgggtgacagagtaagactgtctcaaaaacaaaacccaaaatactaaccatatttatagttagtcacctcaccctttttttagttaaaagaagtttatttagcctgatcagtttaccagatgtcttttttagtgacttttgtgtcttccataaatccattctcaaaatttgcaacagttgagcatatttgaccaaaatgtgccacaggtttctgaagcctgttcaagaagaagcatgtcaacattattggagtaggtcttcgcaatgactacttttgggaagatttgagtaaaatttatggatacagaagttttggagtatgttagaatattactaagtctttttatagttgtaatcccaacactgggttatatatatttaataccaacctgagtatatttcctgaataatatctgttttggagacttggacaaagttaacttttttgcttttttaaaagttgctgtttaaattaacttcctgcatttctaatgtagaaaaaatatggcacagtgatttgaattttgtttatggtttattatcttcctaaattatcagctctttaaaatatgggtctctggcctgtataccatctgataaattaggttgggtaaatttttcacctgaaaaaattcattcttttgacccaggttgtttggcttggaaaaaaaaaatcacatactcattgcatgattaaacttgtccatcagattgtgattttgtgcgttatgaggattgtagctggggtaattttaaaatgttggtatttggatagaactgccagcccaggattttgataaagatcaaaatatatactgtatctaaagtttcttttttaaaagttatttcacttataatcaaaaggtttaaataagtttagtgtatattttatgattagtattattttgtatcgattcagagagaggaaaactgcattcccatagacagggagacttggtgcattaatatccaaagcttagtttaagctggtgatgattagaaaagtggctttcatttgtgttctctggaagattctcagtagtcctgtgggcatgtgaacaagagcatgtgtaatcttcataatgtatgtcttgttagcagaaatgtctgaggcattgctgagatgtaggatgagctgaggtactggttttgtctttcatggttccctattatgttttttgagaaactgagcttttcctgacagtgtttagtttttcttggctatttactatgctattaatagtaacagtttccattatggagcctcagtaggttcttgacatacattaacccattgctattatgtaattttctaataaaatgatgtgataaaacatattttctgtaatatactcatagaatatgtgattataagtaaataaatagatgttggggtagtcctcca

SEQ ID NO: 359 - DNA, 6185 bp, Homo sapien
gaccgggagaagcggggacgcggggccactcacgctgccggctccggaggcggcacgcggccagcgctgctccgctccggggctctttaccccggagtcggggccgggcgcgcgggaaacggttaccgagcggacctggacgccctctgccttcgtcatttcctgccggccggtcggtttccggatgaaacgaggagccaggcatctccttggaaacaatgccatctttgaatgtgagagataaacctagtttcagcatgtctgcagcagagaccagtacatcaggcttattcccacaggaagcctcctaaagcctgtggcgcggcaaccatttccaggactaaataataatgtgtcagatgcctgtgagtggactgcctggccaaatgactcatgaagatattcacggaagaatagtcaaaaaccaaagaaaaggcatattctagaagcaccttcaattccatcgaggatttttgagcagctgaagaagaaagttctgaaaatatgagtgacaggactccagcacattttttttagttgtttcttacattatctttgttaacccatccgcttttgtgtataatattaagttattttccactactgcaatggctagtaatttacttaggctcagagttttactctgtatggacagagaaataggaggtaacaacagtgggagaacaaataggaacagttcactgggatgttggtccccagaaattggctttcattgaataattcctaaagggtgtcgtgtgctgaattgctttttcatagtgatgtgctgcttcttgttcatactcttatgactttaatttcacctttatctactcccagcctctgtatatgcctacgtttttaaaaataatttttggcactgaagatctgattaccatattttttcagtttaaaaattaaatcctcgcaaatagacctttggtatagttgcattctaccctaggttattttctaggatcaagaatagaacaatttctgttctttccagcattactctttactattcatatgttcttgttcagtgttttgttgttctcatattctaggtggaaatgaagggtaatctctatgttctattttcagttttctaggaaaccagaaaaacatgggtagtagaaatgtatagaaaatgtatgaggtctcttaaccattgtgttaaacttgcattaagcttcttttttagcaatatcgatgtcagtgttacctcttctttcctttttatttattttttttgagacagagtctcattctgtcgcccagactggttggagtgcgatgatgcgatcgcggctaactgcaaccgctgcctcccgggtacaagtgattctcgtgccttgggctcccgagtagctgggatttttagtggagaacaggtttcaccatattggccaggctggtcttgaactcgcaacctcaggtgatccacccacctcagcctccccaargtgttgggattacaggcatgagccaccatacctggccccttttgttgttttgaggggcaggcagtaagaagcagggatttcttcaaatgctagtaagcacaaagagagagagggagaagtttttgtaagtaacgaacagggccgggcatggtggcgtgagaggccgaggtgggcagatcacgaggtcaggagttcgagaccagcctgaccaacatggtgaaacccccgtctccactagaaatgcaaagattagccgggcatggtggtgcacgcctgtaatccagctagtcgggaggctgaggcaggagaatcgcttgaacctgggaggtggaggttgcagggagctgagatcacgccactgcactccagcctgggcgacagagtaagactcccgtctcaaaaaaaaaaaaaaaaaaaaaagaacagttgatcattaaggccattaatgtgcatggacagtttgttgcccaggttggagtgtgatgacgacgcaatctcggtaaatataaacctactctgtaacctccacctcctgggctcargcrgttctcgtgcttcagcctcccgagtagctgggatcacaggcatgcgccactaagcccagctaatttttgtatttttagtrgagacggggtttcaccatgttggccaggctggtcttgaactcctggcctcaagtgatgcgcctgcctgggcctcccaaagtgctgggattacaggtgtgagccactgcgcctggcccaataggcacatttttttaataagtagtttgttgattagaacgaagagcacttgccgtaagtgcatgtcattgttttcagctgttatggctaagtcagttaacctcatcaacaattttttcttctgtaaattgaggacaatttttgcttttatgaatgaagtcttaaccagcaggaagaaatataaacaaaggaacatatttttaatttaatgaagcaaaattccatacatcattttgaaaatagtgtttctttccctgataggcctgttctgcatcattcttttagcttccttctgccctgtttatcacttggtcccacttttatatttttcctcttcggtccagaatttcttatttagtttcttgtattttgcctactccctcccttctccatgattcagcctagtctttccgtcctctgtggacttgggtgtgccttcctctgggccacctcgtcttttgctgctgttagccctcccgcctgcgcacctgccacttcaccctcgcctgtggtccacttacgttccactcagcccggtcagtcctgctttgttcttctccaccgccttggtctcccgtgtgtcttatctagctctggttccttctcgtctccacatttattttgttttcttcctgtgcttgttagtccttgtgcacttggtccttgagctctttttctattaataggtattactagatggatttgttgtctgcctttacatagaacacacatccttactgtgcatttcctgggtagccaggatgaatcaattattattaacttcccttcgaacattgagcttcctctgttttctgtttctaagaattagattagtattctagaagactaatactactttaaagacagtcaaaacagtcatacgctgccatttcagccctttatttaagagtttgtgacatttatcactcccttgaaagattaaagaacacccaaagcaagtttggggtggaggtggggaaggcaggaagagaaaggtaagtgctataaaaggactcattgttaatttctagaaattggactgagatctgaaagcataagccttaacattttttagataaacggtccctgaaaagaataaaaagtatcagtacttccgttaactagctttagtattgggtcatttgtagtttacattctcctttaagttttaagaccttcagtagttaacaaagcagacagagactggccaggcacagtggctcacacctgtaataccagcactttgggaggctgagttgggtggatcacaaggtcaggagattgaaaccatcctggccaacatggtgaaaccccgtctctactaaaaatacaaaaaaaaaaaaaaattagccaggcgtggtggcaggcacctgtggtcccagctactcgggaggctggggcaggagaatttcttgagcccgggaggccgaggttgcagtgagctgagatcgcgccactgcactccagcctgggtgacagcgagactctgtctcaaaaagaaaaaaaaaaaaaaaagcagagacttaatcttgtaaatactcattttatttttgagaggcttaatgtctccttaaatattaacctgtgtcattttgtaattatactgtaatagtgtcagaatgccattaacaaccaacccttttcgtttcttgtgtgggaaagctcataaattgtgtggtcttacccctctggaccctgtagttgtagcattgtgaaaatggagcttttggcaaaactttgtattatgctgttgactcacattgtctcatatttttcctttattcttctatattctatgaatatggtgctgtcctgtcatttaattattataatatatgtgaactgctggaggtagactgatgtgagtgcagtttttcaacttaaaaacccttatatatcacattcatggtgtttaagatataagaacagccctacaaagaggggttgattgtattgaagattctttctgctgagcctgccttaattgtgagggtggttgtttgggtatcttagagctaaaagaatggctaagagtccattaatggtcctgtaatattcaccatccctgagcagttagtaaagaatggccgcaaagccacaattaggctactaacaaggaacttatgtagatgtgctaggtccagcctgtgttctggaactatagagatgaataaggtatggtcctttctctctggaggctcacagttgaatagggaatattaatacgtgaatgatagcagtacagtgtggcagatgctaaaatatatgtgtgtagcagctattacaggagaactgattaatagggagagtctggctgggctcagtgactcacccctgtaatcccagcactttgggaggccgaggcgggcagatcacttgaggtcaggagttcgagaccagcctggccaacatggtaaaacctcatctctactaaaaaatacaaagaaaattagcaaggcgtggtggcgggcatctgtaatcccagctactggggaggctgaagcaggagaatcccttgaacccgggaggtgaggttgcagtgagctgagatcatgccactgcactccagcctgggtgacagagtaagactgtctcaaaaacaaaacccaaaatactaaccatatttatagttagtcacctcaccctttttttagttaaaagaagtttatttagcctgatcagtttaccagatgtcttttttagtgacttttgtgtcttccataaatccattctcaaaatttgcaacagttgagcatatttgaccaaaatgtgccacaggtttctgaagcctgttcaagaagaagcatgtcaacattattggagtaggtcttcgcaatgactacttttgggaagatttgagtaaaatttatggatacagaagttttggagtatgttagaatattactaagtctttttatagttgtaatcccaacactgggttatatatatttaataccaacctgagtatatttcctgaataatatctgttttggagacttggacaaagttaacttttttgcttttttaaaagttgctgtttaaattaacttcctgcatttctaatgtagaaaaaatatggcacagtgatttgaattttgtttatggtttattatcttcctaaattatcagctctttaaaatatgggtctctggcctgtataccatctgataaattaggttgggtaaatttttcacctgaaaaaattcattcttttgacccaggttgtttggcttggaaaaaaaaaatcacatactcattgcatgattaaacttgtccatcagattgtgattttgtgcgttatgaggattgtagctggggtaattttaaaatgttggtatttggatagaactgccagcccaggattttgataaagatcaaaatatatactgtatctaaagtttcttttttaaaagttatttcacttataatcaaaaggtttaaataagtttagtgtatattttatgattagtattattttgtatcgattcagagagaggaaaactgcattcccatagacagggagacttggtgcattaatatccaaagcttagtttaagctggtgatgattagaaaagtggctttcatttgtgttctctggaagattctcagtagtcctgtgggcatgtgaacaagagcatgtgtaatcttcataatgtatgtcttgttagcagaaatgtctgaggcattgctgagatgtaggatgagctgaggtactggttttgtctttcatggttccctattatgttttttgagaaactgagcttttcctgacagtgtttagtttttcttggctatttactatgctattaatagtaacagtttccattatggagcctcagtaggttcttgacatacattaacccattgctattatgtaattttctaataaaatgatgtgataaaacatattttctgtaatatactcatagaatatgtgattataagtaaataaatagatgttggggtagtcctcca

SEQ ID NO: 360 - DNA, 6617 bp, Homo sapien
agccggagagacgcagcggcggccccagtgccgcccccgggcgcgtgagtggagccgggctcctttcccctaccgcgccgcgacccccgcccgggctgcgcgcgccgcctcccgcgagcccccggcccgactcccgggctcccgcgggtgggggccagggctggtcggcgccggcggggctcgcggcggcggcgggttgcgtcccccgcgcctgctggcccacgtggacctggccgtcgcttgccgtgcggcgcctttgcgaaaactcgacggaagtggcagggaccgggcattacctgcgagtgccgggcgcctcctgctccgctgtgcgcgcttggggtgggactcggcgggggaggggtcgtgtacattgtcccaccaggcgcaatgtagccgggcggcgcagaggatttcttttttggtcttgagagcatagagtcccttttcatattcacgtgtactcttaagaaagcgtctgttctccaaactggctttccattctccccgtcctaaatgataggggagtgtatacatcaccacaccagctgtccaggaattaggaggaagtgcccttgaatgaagcctgggctgcaagcctggttagcagccagggaggacacacacacgttgcaggcatctccttggaaacaatgccatctttgaatgtgagagataaacctagtttcagcatgtctgcagcagagaccagtacatcaggcttattcccacaggaagcctcctaaagcctgtggcgcggcaaccatttccaggactaaataataatgtgtcagatgcctgtgagtggactgcctggccaaatgactcatgaagatattcacggaagaatagtcaaaaaccaaagaaaaggcatattctagaagcaccttcaattccatcgaggatttttgagcagctgaagaagaaagttctgaaaatatgagtgacaggactccagcacattttttttagttgtttcttacattatctttgttaacccatccgcttttgtgtataatattaagttattttccactactgcaatggctagtaatttacttaggctcagagttttactctgtatggacagagaaataggaggtaacaacagtgggagaacaaataggaacagttcactgggatgttggtccccagaaattggctttcattgaataattcctaaagggtgtcgtgtgctgaattgctttttcatagtgatgtgctgcttcttgttcatactcttatgactttaatttcacctttatctactcccagcctctgtatatgcctacgtttttaaaaataatttttggcactgaagatctgattaccatattttttcagtttaaaaattaaatcctcgcaaatagacctttggtatagttgcattctaccctaggttattttctaggatcaagaatagaacaatttctgttctttccagcattactctttactattcatatgttcttgttcagtgttttgttgttctcatattctaggtggaaatgaagggtaatctctatgttctattttcagttttctaggaaaccagaaaaacatgggtagtagaaatgtatagaaaatgtatgaggtctcttaaccattgtgttaaacttgcattaagcttcttttttagcaatatcgatgtcagtgttacctcttctttcctttttatttattttttttgagacagagtctcattctgtcgcccagactggttggagtgcgatgatgcgatcgcggctaactgcaaccgctgcctcccgggtacaagtgattctcgtgccttgggctcccgagtagctgggatttttagtggagaacaggtttcaccatattggccaggctggtcttgaactcgcaacctcaggtgatccacccacctcagcctccccaargtgttgggattacaggcatgagccaccatacctggccccttttgttgttttgaggggcaggcagtaagaagcagggatttcttcaaatgctagtaagcacaaagagagagagggagaagtttttgtaagtaacgaacagggccgggcatggtggcgtgagaggccgaggtgggcagatcacgaggtcaggagttcgagaccagcctgaccaacatggtgaaacccccgtctccactagaaatgcaaagattagccgggcatggtggtgcacgcctgtaatccagctagtcgggaggctgaggcaggagaatcgcttgaacctgggaggtggaggttgcagggagctgagatcacgccactgcactccagcctgggcgacagagtaagactcccgtctcaaaaaaaaaaaaaaaaaaaaaagaacagttgatcattaaggccattaatgtgcatggacagtttgttgcccaggttggagtgtgatgacgacgcaatctcggtaaatataaacctactctgtaacctccacctcctgggctcargcrgttctcgtgcttcagcctcccgagtagctgggatcacaggcatgcgccactaagcccagctaatttttgtatttttagtrgagacggggtttcaccatgttggccaggctggtcttgaactcctggcctcaagtgatgcgcctgcctgggcctcccaaagtgctgggattacaggtgtgagccactgcgcctggcccaataggcacatttttttaataagtagtttgttgattagaacgaagagcacttgccgtaagtgcatgtcattgttttcagctgttatggctaagtcagttaacctcatcaacaattttttcttctgtaaattgaggacaatttttgcttttatgaatgaagtcttaaccagcaggaagaaatataaacaaaggaacatatttttaatttaatgaagcaaaattccatacatcattttgaaaatagtgtttctttccctgataggcctgttctgcatcattcttttagcttccttctgccctgtttatcacttggtcccacttttatatttttcctcttcggtccagaatttcttatttagtttcttgtattttgcctactccctcccttctccatgattcagcctagtctttccgtcctctgtggacttgggtgtgccttcctctgggccacctcgtcttttgctgctgttagccctcccgcctgcgcacctgccacttcaccctcgcctgtggtccacttacgttccactcagcccggtcagtcctgctttgttcttctccaccgccttggtctcccgtgtgtcttatctagctctggttccttctcgtctccacatttattttgttttcttcctgtgcttgttagtccttgtgcacttggtccttgagctctttttctattaataggtattactagatggatttgttgtctgcctttacatagaacacacatccttactgtgcatttcctgggtagccaggatgaatcaattattattaacttcccttcgaacattgagcttcctctgttttctgtttctaagaattagattagtattctagaagactaatactactttaaagacagtcaaaacagtcatacgctgccatttcagccctttatttaagagtttgtgacatttatcactcccttgaaagattaaagaacacccaaagcaagtttggggtggaggtggggaaggcaggaagagaaaggtaagtgctataaaaggactcattgttaatttctagaaattggactgagatctgaaagcataagccttaacattttttagataaacggtccctgaaaagaataaaaagtatcagtacttccgttaactagctttagtattgggtcatttgtagtttacattctcctttaagttttaagaccttcagtagttaacaaagcagacagagactggccaggcacagtggctcacacctgtaataccagcactttgggaggctgagttgggtggatcacaaggtcaggagattgaaaccatcctggccaacatggtgaaaccccgtctctactaaaaatacaaaaaaaaaaaaaaattagccaggcgtggtggcaggcacctgtggtcccagctactcgggaggctggggcaggagaatttcttgagcccgggaggccgaggttgcagtgagctgagatcgcgccactgcactccagcctgggtgacagcgagactctgtctcaaaaagaaaaaaaaaaaaaaaagcagagacttaatcttgtaaatactcattttatttttgagaggcttaatgtctccttaaatattaacctgtgtcattttgtaattatactgtaatagtgtcagaatgccattaacaaccaacccttttcgtttcttgtgtgggaaagctcataaattgtgtggtcttacccctctggaccctgtagttgtagcattgtgaaaatggagcttttggcaaaactttgtattatgctgttgactcacattgtctcatatttttcctttattcttctatattctatgaatatggtgctgtcctgtcatttaattattataatatatgtgaactgctggaggtagactgatgtgagtgcagtttttcaacttaaaaacccttatatatcacattcatggtgtttaagatataagaacagccctacaaagaggggttgattgtattgaagattctttctgctgagcctgccttaattgtgagggtggttgtttgggtatcttagagctaaaagaatggctaagagtccattaatggtcctgtaatattcaccatccctgagcagttagtaaagaatggccgcaaagccacaattaggctactaacaaggaacttatgtagatgtgctaggtccagcctgtgttctggaactatagagatgaataaggtatggtcctttctctctggaggctcacagttgaatagggaatattaatacgtgaatgatagcagtacagtgtggcagatgctaaaatatatgtgtgtagcagctattacaggagaactgattaatagggagagtctggctgggctcagtgactcacccctgtaatcccagcactttgggaggccgaggcgggcagatcacttgaggtcaggagttcgagaccagcctggccaacatggtaaaacctcatctctactaaaaaatacaaagaaaattagcaaggcgtggtggcgggcatctgtaatcccagctactggggaggctgaagcaggagaatcccttgaacccgggaggtgaggttgcagtgagctgagatcatgccactgcactccagcctgggtgacagagtaagactgtctcaaaaacaaaacccaaaatactaaccatatttatagttagtcacctcaccctttttttagttaaaagaagtttatttagcctgatcagtttaccagatgtcttttttagtgacttttgtgtcttccataaatccattctcaaaatttgcaacagttgagcatatttgaccaaaatgtgccacaggtttctgaagcctgttcaagaagaagcatgtcaacattattggagtaggtcttcgcaatgactacttttgggaagatttgagtaaaatttatggatacagaagttttggagtatgttagaatattactaagtctttttatagttgtaatcccaacactgggttatatatatttaataccaacctgagtatatttcctgaataatatctgttttggagacttggacaaagttaacttttttgcttttttaaaagttgctgtttaaattaacttcctgcatttctaatgtagaaaaaatatggcacagtgatttgaattttgtttatggtttattatcttcctaaattatcagctctttaaaatatgggtctctggcctgtataccatctgataaattaggttgggtaaatttttcacctgaaaaaattcattcttttgacccaggttgtttggcttggaaaaaaaaaatcacatactcattgcatgattaaacttgtccatcagattgtgattttgtgcgttatgaggattgtagctggggtaattttaaaatgttggtatttggatagaactgccagcccaggattttgataaagatcaaaatatatactgtatctaaagtttcttttttaaaagttatttcacttataatcaaaaggtttaaataagtttagtgtatattttatgattagtattattttgtatcgattcagagagaggaaaactgcattcccatagacagggagacttggtgcattaatatccaaagcttagtttaagctggtgatgattagaaaagtggctttcatttgtgttctctggaagattctcagtagtcctgtgggcatgtgaacaagagcatgtgtaatcttcataatgtatgtcttgttagcagaaatgtctgaggcattgctgagatgtaggatgagctgaggtactggttttgtctttcatggttccctattatgttttttgagaaactgagcttttcctgacagtgtttagtttttcttggctatttactatgctattaatagtaacagtttccattatggagcctcagtaggttcttgacatacattaacccattgctattatgtaattttctaataaaatgatgtgataaaacatattttctgtaatatactcatagaatatgtgattataagtaaataaatagatgttggggtagtcctcca

SEQ ID NO: 361 - DNA, 6302 bp, Homo sapien
gaccgggagaagcggggacgcggggccactcacgctgccggctccggaggcggcacgcggccagcgctgctccgctccggggctctttaccccggagtcggggccgggcgcgcgggaaacggttaccgagcggacctggacgccctctgccttcgtcatttcctgccggccggtcggtttccggatgaaacgaggagccagataggggagtgtatacatcaccacaccagctgtccaggaattaggaggaagtgcccttgaatgaagcctgggctgcaagcctggttagcagccagggaggacacacacacgttgcaggcatctccttggaaacaatgccatctttgaatgtgagagataaacctagtttcagcatgtctgcagcagagaccagtacatcaggcttattcccacaggaagcctcctaaagcctgtggcgcggcaaccatttccaggactaaataataatgtgtcagatgcctgtgagtggactgcctggccaaatgactcatgaagatattcacggaagaatagtcaaaaaccaaagaaaaggcatattctagaagcaccttcaattccatcgaggatttttgagcagctgaagaagaaagttctgaaaatatgagtgacaggactccagcacattttttttagttgtttcttacattatctttgttaacccatccgcttttgtgtataatattaagttattttccactactgcaatggctagtaatttacttaggctcagagttttactctgtatggacagagaaataggaggtaacaacagtgggagaacaaataggaacagttcactgggatgttggtccccagaaattggctttcattgaataattcctaaagggtgtcgtgtgctgaattgctttttcatagtgatgtgctgcttcttgttcatactcttatgactttaatttcacctttatctactcccagcctctgtatatgcctacgtttttaaaaataatttttggcactgaagatctgattaccatattttttcagtttaaaaattaaatcctcgcaaatagacctttggtatagttgcattctaccctaggttattttctaggatcaagaatagaacaatttctgttctttccagcattactctttactattcatatgttcttgttcagtgttttgttgttctcatattctaggtggaaatgaagggtaatctctatgttctattttcagttttctaggaaaccagaaaaacatgggtagtagaaatgtatagaaaatgtatgaggtctcttaaccattgtgttaaacttgcattaagcttcttttttagcaatatcgatgtcagtgttacctcttctttcctttttatttattttttttgagacagagtctcattctgtcgcccagactggttggagtgcgatgatgcgatcgcggctaactgcaaccgctgcctcccgggtacaagtgattctcgtgccttgggctcccgagtagctgggatttttagtggagaacaggtttcaccatattggccaggctggtcttgaactcgcaacctcaggtgatccacccacctcagcctccccaargtgttgggattacaggcatgagccaccatacctggccccttttgttgttttgaggggcaggcagtaagaagcagggatttcttcaaatgctagtaagcacaaagagagagagggagaagtttttgtaagtaacgaacagggccgggcatggtggcgtgagaggccgaggtgggcagatcacgaggtcaggagttcgagaccagcctgaccaacatggtgaaacccccgtctccactagaaatgcaaagattagccgggcatggtggtgcacgcctgtaatccagctagtcgggaggctgaggcaggagaatcgcttgaacctgggaggtggaggttgcagggagctgagatcacgccactgcactccagcctgggcgacagagtaagactcccgtctcaaaaaaaaaaaaaaaaaaaaaagaacagttgatcattaaggccattaatgtgcatggacagtttgttgcccaggttggagtgtgatgacgacgcaatctcggtaaatataaacctactctgtaacctccacctcctgggctcargcrgttctcgtgcttcagcctcccgagtagctgggatcacaggcatgcgccactaagcccagctaatttttgtatttttagtrgagacggggtttcaccatgttggccaggctggtcttgaactcctggcctcaagtgatgcgcctgcctgggcctcccaaagtgctgggattacaggtgtgagccactgcgcctggcccaataggcacatttttttaataagtagtttgttgattagaacgaagagcacttgccgtaagtgcatgtcattgttttcagctgttatggctaagtcagttaacctcatcaacaattttttcttctgtaaattgaggacaatttttgcttttatgaatgaagtcttaaccagcaggaagaaatataaacaaaggaacatatttttaatttaatgaagcaaaattccatacatcattttgaaaatagtgtttctttccctgataggcctgttctgcatcattcttttagcttccttctgccctgtttatcacttggtcccacttttatatttttcctcttcggtccagaatttcttatttagtttcttgtattttgcctactccctcccttctccatgattcagcctagtctttccgtcctctgtggacttgggtgtgccttcctctgggccacctcgtcttttgctgctgttagccctcccgcctgcgcacctgccacttcaccctcgcctgtggtccacttacgttccactcagcccggtcagtcctgctttgttcttctccaccgccttggtctcccgtgtgtcttatctagctctggttccttctcgtctccacatttattttgttttcttcctgtgcttgttagtccttgtgcacttggtccttgagctctttttctattaataggtattactagatggatttgttgtctgcctttacatagaacacacatccttactgtgcatttcctgggtagccaggatgaatcaattattattaacttcccttcgaacattgagcttcctctgttttctgtttctaagaattagattagtattctagaagactaatactactttaaagacagtcaaaacagtcatacgctgccatttcagccctttatttaagagtttgtgacatttatcactcccttgaaagattaaagaacacccaaagcaagtttggggtggaggtggggaaggcaggaagagaaaggtaagtgctataaaaggactcattgttaatttctagaaattggactgagatctgaaagcataagccttaacattttttagataaacggtccctgaaaagaataaaaagtatcagtacttccgttaactagctttagtattgggtcatttgtagtttacattctcctttaagttttaagaccttcagtagttaacaaagcagacagagactggccaggcacagtggctcacacctgtaataccagcactttgggaggctgagttgggtggatcacaaggtcaggagattgaaaccatcctggccaacatggtgaaaccccgtctctactaaaaatacaaaaaaaaaaaaaaattagccaggcgtggtggcaggcacctgtggtcccagctactcgggaggctggggcaggagaatttcttgagcccgggaggccgaggttgcagtgagctgagatcgcgccactgcactccagcctgggtgacagcgagactctgtctcaaaaagaaaaaaaaaaaaaaaagcagagacttaatcttgtaaatactcattttatttttgagaggcttaatgtctccttaaatattaacctgtgtcattttgtaattatactgtaatagtgtcagaatgccattaacaaccaacccttttcgtttcttgtgtgggaaagctcataaattgtgtggtcttacccctctggaccctgtagttgtagcattgtgaaaatggagcttttggcaaaactttgtattatgctgttgactcacattgtctcatatttttcctttattcttctatattctatgaatatggtgctgtcctgtcatttaattattataatatatgtgaactgctggaggtagactgatgtgagtgcagtttttcaacttaaaaacccttatatatcacattcatggtgtttaagatataagaacagccctacaaagaggggttgattgtattgaagattctttctgctgagcctgccttaattgtgagggtggttgtttgggtatcttagagctaaaagaatggctaagagtccattaatggtcctgtaatattcaccatccctgagcagttagtaaagaatggccgcaaagccacaattaggctactaacaaggaacttatgtagatgtgctaggtccagcctgtgttctggaactatagagatgaataaggtatggtcctttctctctggaggctcacagttgaatagggaatattaatacgtgaatgatagcagtacagtgtggcagatgctaaaatatatgtgtgtagcagctattacaggagaactgattaatagggagagtctggctgggctcagtgactcacccctgtaatcccagcactttgggaggccgaggcgggcagatcacttgaggtcaggagttcgagaccagcctggccaacatggtaaaacctcatctctactaaaaaatacaaagaaaattagcaaggcgtggtggcgggcatctgtaatcccagctactggggaggctgaagcaggagaatcccttgaacccgggaggtgaggttgcagtgagctgagatcatgccactgcactccagcctgggtgacagagtaagactgtctcaaaaacaaaacccaaaatactaaccatatttatagttagtcacctcaccctttttttagttaaaagaagtttatttagcctgatcagtttaccagatgtcttttttagtgacttttgtgtcttccataaatccattctcaaaatttgcaacagttgagcatatttgaccaaaatgtgccacaggtttctgaagcctgttcaagaagaagcatgtcaacattattggagtaggtcttcgcaatgactacttttgggaagatttgagtaaaatttatggatacagaagttttggagtatgttagaatattactaagtctttttatagttgtaatcccaacactgggttatatatatttaataccaacctgagtatatttcctgaataatatctgttttggagacttggacaaagttaacttttttgcttttttaaaagttgctgtttaaattaacttcctgcatttctaatgtagaaaaaatatggcacagtgatttgaattttgtttatggtttattatcttcctaaattatcagctctttaaaatatgggtctctggcctgtataccatctgataaattaggttgggtaaatttttcacctgaaaaaattcattcttttgacccaggttgtttggcttggaaaaaaaaaatcacatactcattgcatgattaaacttgtccatcagattgtgattttgtgcgttatgaggattgtagctggggtaattttaaaatgttggtatttggatagaactgccagcccaggattttgataaagatcaaaatatatactgtatctaaagtttcttttttaaaagttatttcacttataatcaaaaggtttaaataagtttagtgtatattttatgattagtattattttgtatcgattcagagagaggaaaactgcattcccatagacagggagacttggtgcattaatatccaaagcttagtttaagctggtgatgattagaaaagtggctttcatttgtgttctctggaagattctcagtagtcctgtgggcatgtgaacaagagcatgtgtaatcttcataatgtatgtcttgttagcagaaatgtctgaggcattgctgagatgtaggatgagctgaggtactggttttgtctttcatggttccctattatgttttttgagaaactgagcttttcctgacagtgtttagtttttcttggctatttactatgctattaatagtaacagtttccattatggagcctcagtaggttcttgacatacattaacccattgctattatgtaattttctaataaaatgatgtgataaaacatattttctgtaatatactcatagaatatgtgattataagtaaataaatagatgttggggtagtcctcca

SEQ ID NO: 362 - DNA, 6223 bp, Homo sapien
caagatgaagaacagtggtatttctctgaaagtcccagtatgtctcccttttgttgggagctgacagtatgatttggggggcatcgggcatcaacagtcactgaatctaaatggctccacagataggggagtgtatacatcaccacaccagctgtccaggaattaggaggaagtgcccttgaatgaagcctgggctgcaagcctggttagcagccagggaggacacacacacgttgcaggcatctccttggaaacaatgccatctttgaatgtgagagataaacctagtttcagcatgtctgcagcagagaccagtacatcaggcttattcccacaggaagcctcctaaagcctgtggcgcggcaaccatttccaggactaaataataatgtgtcagatgcctgtgagtggactgcctggccaaatgactcatgaagatattcacggaagaatagtcaaaaaccaaagaaaaggcatattctagaagcaccttcaattccatcgaggatttttgagcagctgaagaagaaagttctgaaaatatgagtgacaggactccagcacattttttttagttgtttcttacattatctttgttaacccatccgcttttgtgtataatattaagttattttccactactgcaatggctagtaatttacttaggctcagagttttactctgtatggacagagaaataggaggtaacaacagtgggagaacaaataggaacagttcactgggatgttggtccccagaaattggctttcattgaataattcctaaagggtgtcgtgtgctgaattgctttttcatagtgatgtgctgcttcttgttcatactcttatgactttaatttcacctttatctactcccagcctctgtatatgcctacgtttttaaaaataatttttggcactgaagatctgattaccatattttttcagtttaaaaattaaatcctcgcaaatagacctttggtatagttgcattctaccctaggttattttctaggatcaagaatagaacaatttctgttctttccagcattactctttactattcatatgttcttgttcagtgttttgttgttctcatattctaggtggaaatgaagggtaatctctatgttctattttcagttttctaggaaaccagaaaaacatgggtagtagaaatgtatagaaaatgtatgaggtctcttaaccattgtgttaaacttgcattaagcttcttttttagcaatatcgatgtcagtgttacctcttctttcctttttatttattttttttgagacagagtctcattctgtcgcccagactggttggagtgcgatgatgcgatcgcggctaactgcaaccgctgcctcccgggtacaagtgattctcgtgccttgggctcccgagtagctgggatttttagtggagaacaggtttcaccatattggccaggctggtcttgaactcgcaacctcaggtgatccacccacctcagcctccccaargtgttgggattacaggcatgagccaccatacctggccccttttgttgttttgaggggcaggcagtaagaagcagggatttcttcaaatgctagtaagcacaaagagagagagggagaagtttttgtaagtaacgaacagggccgggcatggtggcgtgagaggccgaggtgggcagatcacgaggtcaggagttcgagaccagcctgaccaacatggtgaaacccccgtctccactagaaatgcaaagattagccgggcatggtggtgcacgcctgtaatccagctagtcgggaggctgaggcaggagaatcgcttgaacctgggaggtggaggttgcagggagctgagatcacgccactgcactccagcctgggcgacagagtaagactcccgtctcaaaaaaaaaaaaaaaaaaaaaagaacagttgatcattaaggccattaatgtgcatggacagtttgttgcccaggttggagtgtgatgacgacgcaatctcggtaaatataaacctactctgtaacctccacctcctgggctcargcrgttctcgtgcttcagcctcccgagtagctgggatcacaggcatgcgccactaagcccagctaatttttgtatttttagtrgagacggggtttcaccatgttggccaggctggtcttgaactcctggcctcaagtgatgcgcctgcctgggcctcccaaagtgctgggattacaggtgtgagccactgcgcctggcccaataggcacatttttttaataagtagtttgttgattagaacgaagagcacttgccgtaagtgcatgtcattgttttcagctgttatggctaagtcagttaacctcatcaacaattttttcttctgtaaattgaggacaatttttgcttttatgaatgaagtcttaaccagcaggaagaaatataaacaaaggaacatatttttaatttaatgaagcaaaattccatacatcattttgaaaatagtgtttctttccctgataggcctgttctgcatcattcttttagcttccttctgccctgtttatcacttggtcccacttttatatttttcctcttcggtccagaatttcttatttagtttcttgtattttgcctactccctcccttctccatgattcagcctagtctttccgtcctctgtggacttgggtgtgccttcctctgggccacctcgtcttttgctgctgttagccctcccgcctgcgcacctgccacttcaccctcgcctgtggtccacttacgttccactcagcccggtcagtcctgctttgttcttctccaccgccttggtctcccgtgtgtcttatctagctctggttccttctcgtctccacatttattttgttttcttcctgtgcttgttagtccttgtgcacttggtccttgagctctttttctattaataggtattactagatggatttgttgtctgcctttacatagaacacacatccttactgtgcatttcctgggtagccaggatgaatcaattattattaacttcccttcgaacattgagcttcctctgttttctgtttctaagaattagattagtattctagaagactaatactactttaaagacagtcaaaacagtcatacgctgccatttcagccctttatttaagagtttgtgacatttatcactcccttgaaagattaaagaacacccaaagcaagtttggggtggaggtggggaaggcaggaagagaaaggtaagtgctataaaaggactcattgttaatttctagaaattggactgagatctgaaagcataagccttaacattttttagataaacggtccctgaaaagaataaaaagtatcagtacttccgttaactagctttagtattgggtcatttgtagtttacattctcctttaagttttaagaccttcagtagttaacaaagcagacagagactggccaggcacagtggctcacacctgtaataccagcactttgggaggctgagttgggtggatcacaaggtcaggagattgaaaccatcctggccaacatggtgaaaccccgtctctactaaaaatacaaaaaaaaaaaaaaattagccaggcgtggtggcaggcacctgtggtcccagctactcgggaggctggggcaggagaatttcttgagcccgggaggccgaggttgcagtgagctgagatcgcgccactgcactccagcctgggtgacagcgagactctgtctcaaaaagaaaaaaaaaaaaaaaagcagagacttaatcttgtaaatactcattttatttttgagaggcttaatgtctccttaaatattaacctgtgtcattttgtaattatactgtaatagtgtcagaatgccattaacaaccaacccttttcgtttcttgtgtgggaaagctcataaattgtgtggtcttacccctctggaccctgtagttgtagcattgtgaaaatggagcttttggcaaaactttgtattatgctgttgactcacattgtctcatatttttcctttattcttctatattctatgaatatggtgctgtcctgtcatttaattattataatatatgtgaactgctggaggtagactgatgtgagtgcagtttttcaacttaaaaacccttatatatcacattcatggtgtttaagatataagaacagccctacaaagaggggttgattgtattgaagattctttctgctgagcctgccttaattgtgagggtggttgtttgggtatcttagagctaaaagaatggctaagagtccattaatggtcctgtaatattcaccatccctgagcagttagtaaagaatggccgcaaagccacaattaggctactaacaaggaacttatgtagatgtgctaggtccagcctgtgttctggaactatagagatgaataaggtatggtcctttctctctggaggctcacagttgaatagggaatattaatacgtgaatgatagcagtacagtgtggcagatgctaaaatatatgtgtgtagcagctattacaggagaactgattaatagggagagtctggctgggctcagtgactcacccctgtaatcccagcactttgggaggccgaggcgggcagatcacttgaggtcaggagttcgagaccagcctggccaacatggtaaaacctcatctctactaaaaaatacaaagaaaattagcaaggcgtggtggcgggcatctgtaatcccagctactggggaggctgaagcaggagaatcccttgaacccgggaggtgaggttgcagtgagctgagatcatgccactgcactccagcctgggtgacagagtaagactgtctcaaaaacaaaacccaaaatactaaccatatttatagttagtcacctcaccctttttttagttaaaagaagtttatttagcctgatcagtttaccagatgtcttttttagtgacttttgtgtcttccataaatccattctcaaaatttgcaacagttgagcatatttgaccaaaatgtgccacaggtttctgaagcctgttcaagaagaagcatgtcaacattattggagtaggtcttcgcaatgactacttttgggaagatttgagtaaaatttatggatacagaagttttggagtatgttagaatattactaagtctttttatagttgtaatcccaacactgggttatatatatttaataccaacctgagtatatttcctgaataatatctgttttggagacttggacaaagttaacttttttgcttttttaaaagttgctgtttaaattaacttcctgcatttctaatgtagaaaaaatatggcacagtgatttgaattttgtttatggtttattatcttcctaaattatcagctctttaaaatatgggtctctggcctgtataccatctgataaattaggttgggtaaatttttcacctgaaaaaattcattcttttgacccaggttgtttggcttggaaaaaaaaaatcacatactcattgcatgattaaacttgtccatcagattgtgattttgtgcgttatgaggattgtagctggggtaattttaaaatgttggtatttggatagaactgccagcccaggattttgataaagatcaaaatatatactgtatctaaagtttcttttttaaaagttatttcacttataatcaaaaggtttaaataagtttagtgtatattttatgattagtattattttgtatcgattcagagagaggaaaactgcattcccatagacagggagacttggtgcattaatatccaaagcttagtttaagctggtgatgattagaaaagtggctttcatttgtgttctctggaagattctcagtagtcctgtgggcatgtgaacaagagcatgtgtaatcttcataatgtatgtcttgttagcagaaatgtctgaggcattgctgagatgtaggatgagctgaggtactggttttgtctttcatggttccctattatgttttttgagaaactgagcttttcctgacagtgtttagtttttcttggctatttactatgctattaatagtaacagtttccattatggagcctcagtaggttcttgacatacattaacccattgctattatgtaattttctaataaaatgatgtgataaaacatattttctgtaatatactcatagaatatgtgattataagtaaataaatagatgttggggtagtcctcca

SEQ ID NO: 363 - DNA, 6634 bp, Homo sapien
agccggagagacgcagcggcggccccagtgccgcccccgggcgcgtgagtggagccgggctcctttcccctaccgcgccgcgacccccgcccgggctgcgcgcgccgcctcccgcgagcccccggcccgactcccgggctcccgcgggtgggggccagggctggtcggcgccggcggggctcgcggcggcggcgggttgcgtcccccgcgcctgctggcccacgtggacctggccgtcgcttgccgtgcggcgcctttgcgaaaactcgacggaagtggcagggaccgggcattacctgcgagtgccgggcgcctcctgctccgctgtgcgcgcttggggtgggactcggcgggggaggggtcgtgtacattgtcccaccaggcgcaatgtagccgggcggcgcagaggatttcttttttggtcttgagagcatagagtcccttttcatattcacgtgtactcttaagaaagcgtctgttctccaaactggctttccattctccccgtcctaaatggtgcgtggctgacaccgtagtgttttcaaaactggatatggccaggatgctatagcattgtcagtgcatctccttggaaacaatgccatctttgaatgtgagagataaacctagtttcagcatgtctgcagcagagaccagtacatcaggcttattcccacaggaagcctcctaaagcctgtggcgcggcaaccatttccaggactaaataataatgtgtcagatgcctgtgagtggactgcctggccaaatgactcatgaagatattcacggaagaatagtcaaaaaccaaagaaaaggcatattctagaagcaccttcaattccatcgaggatttttgagcagctgaagaagaaagttctgaaaatatgagtgacaggactccagcacattttttttagttgtttcttacattatctttgttaacccatccgcttttgtgtataatattaagttattttccactactgcaatggctagtaatttacttaggctcagagttttactctgtatggacagagaaataggaggtaacaacagtgggagaacaaataggaacagttcactgggatgttggtccccagaaattggctttcattgaataattcctaaagggtgtcgtgtgctgaattgctttttcatagtgatgtgctgcttcttgttcatactcttatgactttaatttcacctttatctactcccagcctctgtatatgcctacgtttttaaaaataatttttggcactgaagatctgattaccatattttttcagtttaaaaattaaatcctcgcaaatagacctttggtatagttgcattctaccctaggttattttctaggatcaagaatagaacaatttctgttctttccagcattactctttactattcatatgttcttgttcagtgttttgttgttctcatattctaggtggaaatgaagggtaatctctatgttctattttcagttttctaggaaaccagaaaaacatgggtagtagaaatgtatagaaaatgtatgaggtctcttaaccattgtgttaaacttgcattaagcttcttttttagcaatatcgatgtcagtgttacctcttctttcctttttatttattttttttgagacagagtctcattctgtcgcccagactggttggagtgcgatgatgcgatcgcggctaactgcaaccgctgcctcccgggtacaagtgattctcgtgccttgggctcccgagtagctgggatttttagtggagaacaggtttcaccatattggccaggctggtcttgaactcgcaacctcaggtgatccacccacctcagcctccccaargtgttgggattacaggcatgagccaccatacctggccccttttgttgttttgaggggcaggcagtaagaagcagggatttcttcaaatgctagtaagcacaaagagagagagggagaagtttttgtaagtaacgaacagggccgggcatggtggcgtgagaggccgaggtgggcagatcacgaggtcaggagttcgagaccagcctgaccaacatggtgaaacccccgtctccactagaaatgcaaagattagccgggcatggtggtgcacgcctgtaatccagctagtcgggaggctgaggcaggagaatcgcttgaacctgggaggtggaggttgcagggagctgagatcacgccactgcactccagcctgggcgacagagtaagactcccgtctcaaaaaaaaaaaaaaaaaaaaaagaacagttgatcattaaggccattaatgtgcatggacagtttgttgcccaggttggagtgtgatgacgacgcaatctcggtaaatataaacctactctgtaacctccacctcctgggctcargcrgttctcgtgcttcagcctcccgagtagctgggatcacaggcatgcgccactaagcccagctaatttttgtatttttagtrgagacggggtttcaccatgttggccaggctggtcttgaactcctggcctcaagtgatgcgcctgcctgggcctcccaaagtgctgggattacaggtgtgagccactgcgcctggcccaataggcacatttttttaataagtagtttgttgattagaacgaagagcacttgccgtaagtgcatgtcattgttttcagctgttatggctaagtcagttaacctcatcaacaattttttcttctgtaaattgaggacaatttttgcttttatgaatgaagtcttaaccagcaggaagaaatataaacaaaggaacatatttttaatttaatgaagcaaaattccatacatcattttgaaaatagtgtttctttccctgataggcctgttctgcatcattcttttagcttccttctgccctgtttatcacttggtcccacttttatatttttcctcttcggtccagaatttcttatttagtttcttgtattttgcctactccctcccttctccatgattcagcctagtctttccgtcctctgtggacttgggtgtgccttcctctgggccacctcgtcttttgctgctgttagccctcccgcctgcgcacctgccacttcaccctcgcctgtggtccacttacgttccactcagcccggtcagtcctgctttgttcttctccaccgccttggtctcccgtgtgtcttatctagctctggttccttctcgtctccacatttattttgttttcttcctgtgcttgttagtccttgtgcacttggtccttgagctctttttctattaataggtattactagatggatttgttgtctgcctttacatagaacacacatccttactgtgcatttcctgggtagccaggatgaatcaattattattaacttcccttcgaacattgagcttcctctgttttctgtttctaagaattagattagtattctagaagactaatactactttaaagacagtcaaaacagtcatacgctgccatttcagccctttatttaagagtttgtgacatttatcactcccttgaaagattaaagaacacccaaagcaagtttggggtggaggtggggaaggcaggaagagaaaggtaagtgctataaaaggactcattgttaatttctagaaattggactgagatctgaaagcataagccttaacattttttagataaacggtccctgaaaagaataaaaagtatcagtacttccgttaactagctttagtattgggtcatttgtagtttacattctcctttaagttttaagaccttcagtagttaacaaagcagacagagactggccaggcacagtggctcacacctgtaataccagcactttgggaggctgagttgggtggatcacaaggtcaggagattgaaaccatcctggccaacatggtgaaaccccgtctctactaaaaatacaaaaaaaaaaaaaaattagccaggcgtggtggcaggcacctgtggtcccagctactcgggaggctggggcaggagaatttcttgagcccgggaggccgaggttgcagtgagctgagatcgcgccactgcactccagcctgggtgacagcgagactctgtctcaaaaagaaaaaaaaaaaaaaaagcagagacttaatcttgtaaatactcattttatttttgagaggcttaatgtctccttaaatattaacctgtgtcattttgtaattatactgtaatagtgtcagaatgccattaacaaccaacccttttcgtttcttgtgtgggaaagctcataaattgtgtggtcttacccctctggaccctgtagttgtagcattgtgaaaatggagcttttggcaaaactttgtattatgctgttgactcacattgtctcatatttttcctttattcttctatattctatgaatatggtgctgtcctgtcatttaattattataatatatgtgaactgctggaggtagactgatgtgagtgcagtttttcaacttaaaaacccttatatatcacattcatggtgtttaagatataagaacagccctacaaagaggggttgattgtattgaagattctttctgctgagcctgccttaattgtgagggtggttgtttgggtatcttagagctaaaagaatggctaagagtccattaatggtcctgtaatattcaccatccctgagcagttagtaaagaatggccgcaaagccacaattaggctactaacaaggaacttatgtagatgtgctaggtccagcctgtgttctggaactatagagatgaataaggtatggtcctttctctctggaggctcacagttgaatagggaatattaatacgtgaatgatagcagtacagtgtggcagatgctaaaatatatgtgtgtagcagctattacaggagaactgattaatagggagagtctggctgggctcagtgactcacccctgtaatcccagcactttgggaggccgaggcgggcagatcacttgaggtcaggagttcgagaccagcctggccaacatggtaaaacctcatctctactaaaaaatacaaagaaaattagcaaggcgtggtggcgggcatctgtaatcccagctactggggaggctgaagcaggagaatcccttgaacccgggaggtgaggttgcagtgagctgagatcatgccactgcactccagcctgggtgacagagtaagactgtctcaaaaacaaaacccaaaatactaaccatatttatagttagtcacctcaccctttttttagttaaaagaagtttatttagcctgatcagtttaccagatgtcttttttagtgacttttgtgtcttccataaatccattctcaaaatttgcaacagttgagcatatttgaccaaaatgtgccacaggtttctgaagcctgttcaagaagaagcatgtcaacattattggagtaggtcttcgcaatgactacttttgggaagatttgagtaaaatttatggatacagaagttttggagtatgttagaatattactaagtctttttatagttgtaatcccaacactgggttatatatatttaataccaacctgagtatatttcctgaataatatctgttttggagacttggacaaagttaacttttttgcttttttaaaagttgctgtttaaattaacttcctgcatttctaatgtagaaaaaatatggcacagtgatttgaattttgtttatggtttattatcttcctaaattatcagctctttaaaatatgggtctctggcctgtataccatctgataaattaggttgggtaaatttttcacctgaaaaaattcattcttttgacccaggttgtttggcttggaaaaaaaaaatcacatactcattgcatgattaaacttgtccatcagattgtgattttgtgcgttatgaggattgtagctggggtaattttaaaatgttggtatttggatagaactgccagcccaggattttgataaagatcaaaatatatactgtatctaaagtttcttttttaaaagttatttcacttataatcaaaaggtttaaataagtttagtgtatattttatgattagtattattttgtatcgattcagagagaggaaaactgcattcccatagacagggagacttggtgcattaatatccaaagcttagtttaagctggtgatgattagaaaagtggctttcatttgtgttctctggaagattctcagtagtcctgtgggcatgtgaacaagagcatgtgtaatcttcataatgtatgtcttgttagcagaaatgtctgaggcattgctgagatgtaggatgagctgaggtactggttttgtctttcatggttccctattatgttttttgagaaactgagcttttcctgacagtgtttagtttttcttggctatttactatgctattaatagtaacagtttccattatggagcctcagtaggttcttgacatacattaacccattgctattatgtaattttctaataaaatgatgtgataaaacatattttctgtaatatactcatagaatatgtgattataagtaaataaatagatgttggggtagtcctccagattggttgtattacattttatttttttcaaaattcttttaattttaaaatttcttatttattacattt

SEQ ID NO: 364 - DNA, 6645 bp, Homo sapien
agccggagagacgcagcggcggccccagtgccgcccccgggcgcgtgagtggagccgggctcctttcccctaccgcgccgcgacccccgcccgggctgcgcgcgccgcctcccgcgagcccccggcccgactcccgggctcccgcgggtgggggccagggctggtcggcgccggcggggctcgcggcggcggcgggttgcgtcccccgcgcctgctggcccacgtggacctggccgtcgcttgccgtgcggcgcctttgcgaaaactcgacggaagtggcagggaccgggcattacctgcgagtgccgggcgcctcctgctccgctgtgcgcgcttggggtgggactcggcgggggaggggtcgtgtacattgtcccaccaggcgcaatgtagccgggcggcgcagaggatttcttttttggtcttgagagcatagagtcccttttcatattcacgtgtactcttaagaaagcgtctgttctccaaactggctttccattctccccgtcctaaatggtgcgtggctgacaccgtagtgttttcaaaactggatatggccaggatgctatagcattgtcagtgcatctccttggaaacaatgccatctttgaatgtgagagataaacctagtttcagcatgtctgcagcagagaccagtacatcaggcttattcccacaggaagcctcctaaagcctgtggcgcggcaaccatttccaggactaaataataatgtgtcagatgcctgtgagtggactgcctggccaaatgactcatgaagatattcacggaagaatagtcaaaaaccaaagaaaaggcatattctagaagcaccttcaattccatcgaggatttttgagcagctgaagaagaaagttctgaaaatatgagtgacaggactccagcacattttttttagttgtttcttacattatctttgttaacccatccgcttttgtgtataatattaagttattttccactactgcaatggctagtaatttacttaggctcagagttttactctgtatggacagagaaataggaggtaacaacagtgggagaacaaataggaacagttcactgggatgttggtccccagaaattggctttcattgaataattcctaaagggtgtcgtgtgctgaattgctttttcatagtgatgtgctgcttcttgttcatactcttatgactttaatttcacctttatctactcccagcctctgtatatgcctacgtttttaaaaataatttttggcactgaagatctgattaccatattttttcagtttaaaaattaaatcctcgcaaatagacctttggtatagttgcattctaccctaggttattttctaggatcaagaatagaacaatttctgttctttccagcattactctttactattcatatgttcttgttcagtgttttgttgttctcatattctaggtggaaatgaagggtaatctctatgttctattttcagttttctaggaaaccagaaaaacatgggtagtagaaatgtatagaaaatgtatgaggtctcttaaccattgtgttaaacttgcattaagcttcttttttagcaatatcgatgtcagtgttacctcttctttcctttttatttattttttttgagacagagtctcattctgtcgcccagactggttggagtgcgatgatgcgatcgcggctaactgcaaccgctgcctcccgggtacaagtgattctcgtgccttgggctcccgagtagctgggatttttagtggagaacaggtttcaccatattggccaggctggtcttgaactcgcaacctcaggtgatccacccacctcagcctccccaargtgttgggattacaggcatgagccaccatacctggccccttttgttgttttgaggggcaggcagtaagaagcagggatttcttcaaatgctagtaagcacaaagagagagagggagaagtttttgtaagtaacgaacagggccgggcatggtggcgtgagaggccgaggtgggcagatcacgaggtcaggagttcgagaccagcctgaccaacatggtgaaacccccgtctccactagaaatgcaaagattagccgggcatggtggtgcacgcctgtaatccagctagtcgggaggctgaggcaggagaatcgcttgaacctgggaggtggaggttgcagggagctgagatcacgccactgcactccagcctgggcgacagagtaagactcccgtctcaaaaaaaaaaaaaaaaaaaaaagaacagttgatcattaaggccattaatgtgcatggacagtttgttgcccaggttggagtgtgatgacgacgcaatctcggtaaatataaacctactctgtaacctccacctcctgggctcargcrgttctcgtgcttcagcctcccgagtagctgggatcacaggcatgcgccactaagcccagctaatttttgtatttttagtrgagacggggtttcaccatgttggccaggctggtcttgaactcctggcctcaagtgatgcgcctgcctgggcctcccaaagtgctgggattacaggtgtgagccactgcgcctggcccaataggcacatttttttaataagtagtttgttgattagaacgaagagcacttgccgtaagtgcatgtcattgttttcagctgttatggctaagtcagttaacctcatcaacaattttttcttctgtaaattgaggacaatttttgcttttatgaatgaagtcttaaccagcaggaagaaatataaacaaaggaacatatttttaatttaatgaagcaaaattccatacatcattttgaaaatagtgtttctttccctgataggcctgttctgcatcattcttttagcttccttctgccctgtttatcacttggtcccacttttatatttttcctcttcggtccagaatttcttatttagtttcttgtattttgcctactccctcccttctccatgattcagcctagtctttccgtcctctgtggacttgggtgtgccttcctctgggccacctcgtcttttgctgctgttagccctcccgcctgcgcacctgccacttcaccctcgcctgtggtccacttacgttccactcagcccggtcagtcctgctttgttcttctccaccgccttggtctcccgtgtgtcttatctagctctggttccttctcgtctccacatttattttgttttcttcctgtgcttgttagtccttgtgcacttggtccttgagctctttttctattaataggtattactagatggatttgttgtctgcctttacatagaacacacatccttactgtgcatttcctgggtagccaggatgaatcaattattattaacttcccttcgaacattgagcttcctctgttttctgtttctaagaattagattagtattctagaagactaatactactttaaagacagtcaaaacagtcatacgctgccatttcagccctttatttaagagtttgtgacatttatcactcccttgaaagattaaagaacacccaaagcaagtttggggtggaggtggggaaggcaggaagagaaaggtaagtgctataaaaggactcattgttaatttctagaaattggactgagatctgaaagcataagccttaacattttttagataaacggtccctgaaaagaataaaaagtatcagtacttccgttaactagctttagtattgggtcatttgtagtttacattctcctttaagttttaagaccttcagtagttaacaaagcagacagagactggccaggcacagtggctcacacctgtaataccagcactttgggaggctgagttgggtggatcacaaggtcaggagattgaaaccatcctggccaacatggtgaaaccccgtctctactaaaaatacaaaaaaaaaaaaaaattagccaggcgtggtggcaggcacctgtggtcccagctactcgggaggctggggcaggagaatttcttgagcccgggaggccgaggttgcagtgagctgagatcgcgccactgcactccagcctgggtgacagcgagactctgtctcaaaaagaaaaaaaaaaaaaaaagcagagacttaatcttgtaaatactcattttatttttgagaggcttaatgtctccttaaatattaacctgtgtcattttgtaattatactgtaatagtgtcagaatgccattaacaaccaacccttttcgtttcttgtgtgggaaagctcataaattgtgtggtcttacccctctggaccctgtagttgtagcattgtgaaaatggagcttttggcaaaactttgtattatgctgttgactcacattgtctcatatttttcctttattcttctatattctatgaatatggtgctgtcctgtcatttaattattataatatatgtgaactgctggaggtagactgatgtgagtgcagtttttcaacttaaaaacccttatatatcacattcatggtgtttaagatataagaacagccctacaaagaggggttgattgtattgaagattctttctgctgagcctgccttaattgtgagggtggttgtttgggtatcttagagctaaaagaatggctaagagtccattaatggtcctgtaatattcaccatccctgagcagttagtaaagaatggccgcaaagccacaattaggctactaacaaggaacttatgtagatgtgctaggtccagcctgtgttctggaactatagagatgaataaggtatggtcctttctctctggaggctcacagttgaatagggaatattaatacgtgaatgatagcagtacagtgtggcagatgctaaaatatatgtgtgtagcagctattacaggagaactgattaatagggagagtctggctgggctcagtgactcacccctgtaatcccagcactttgggaggccgaggcgggcagatcacttgaggtcaggagttcgagaccagcctggccaacatggtaaaacctcatctctactaaaaaatacaaagaaaattagcaaggcgtggtggcgggcatctgtaatcccagctactggggaggctgaagcaggagaatcccttgaacccgggaggtgaggttgcagtgagctgagatcatgccactgcactccagcctgggtgacagagtaagactgtctcaaaaacaaaacccaaaatactaaccatatttatagttagtcacctcaccctttttttagttaaaagaagtttatttagcctgatcagtttaccagatgtcttttttagtgacttttgtgtcttccataaatccattctcaaaatttgcaacagttgagcatatttgaccaaaatgtgccacaggtttctgaagcctgttcaagaagaagcatgtcaacattattggagtaggtcttcgcaatgactacttttgggaagatttgagtaaaatttatggatacagaagttttggagtatgttagaatattactaagtctttttatagttgtaatcccaacactgggttatatatatttaataccaacctgagtatatttcctgaataatatctgttttggagacttggacaaagttaacttttttgcttttttaaaagttgctgtttaaattaacttcctgcatttctaatgtagaaaaaatatggcacagtgatttgaattttgtttatggtttattatcttcctaaattatcagctctttaaaatatgggtctctggcctgtataccatctgataaattaggttgggtaaatttttcacctgaaaaaattcattcttttgacccaggttgtttggcttggaaaaaaaaaatcacatactcattgcatgattaaacttgtccatcagattgtgattttgtgcgttatgaggattgtagctggggtaattttaaaatgttggtatttggatagaactgccagcccaggattttgataaagatcaaaatatatactgtatctaaagtttcttttttaaaagttatttcacttataatcaaaaggtttaaataagtttagtgtatattttatgattagtattattttgtatcgattcagagagaggaaaactgcattcccatagacagggagacttggtgcattaatatccaaagcttagtttaagctggtgatgattagaaaagtggctttcatttgtgttctctggaagattctcagtagtcctgtgggcatgtgaacaagagcatgtgtaatcttcataatgtatgtcttgttagcagaaatgtctgaggcattgctgagatgtaggatgagctgaggtactggttttgtctttcatggttccctattatgttttttgagaaactgagcttttcctgacagtgtttagtttttcttggctatttactatgctattaatagtaacagtttccattatggagcctcagtaggttcttgacatacattaacccattgctattatgtaattttctaataaaatgatgtgataaaacatattttctgtaatatactcatagaatatgtgattataagtaaataaatagatgttggggtagtcctccaaaatggaaactgttactattaatagcatagtaaatagccaagaaaaactaaacactgtcaggaaaagctcagtttctgtc

SEQ ID NO: 365 - DNA, 5565 bp, Homo sapien
agccggagagacgcagcggcggccccagtgccgcccccgggcgcgtgagtggagccgggctcctttcccctaccgcgccgcgacccccgcccgggctgcgcgcgccgcctcccgcgagcccccggcccgactcccgggctcccgcgggtgggggccagggctggtcggcgccggcggggctcgcggcggcggcgggttgcgtcccccgcgcctgctggcccacgtggacctggccgtcgcttgccgtgcggcgcctttgcgaaaactcgacggaagtggcagggaccgggcattacctgcgagtgccgggcgcctcctgctccgctgtgcgcgcttggggtgggactcggcgggggaggggtcgtgtacattgtcccaccaggcgcaatgtagccgggcggcgcagaggatttcttttttggtcttgagagcatagagtcccttttcatattcacgtgtactcttaagaaagcgtctgttctccaaactggctttccattctccccgtcctaaatggtgcgtggctgacaccgtagtgttttcaaaactggatatggccaggatgctatagcattgtcagtgcatctccttggaaacaatgccatctttgaatgtgagagataaacctagtttcagcatgtctgcagcagagaccagtacatcaggcttattcccacaggaagcctcctaaagcctgtggcgcggcaaccatttccaggactaaataataatgtgtcagatgcctgtgagtggactgcctggccaaatgactcatgaagatattcacggaagaatagtcaaaaaccaaagaaaaggcatattctagaagcaccttcaattccatcgaggatttttgagcagctgaagaagaaagttctgaaaatatgagtgacaggactccagcacattttttttagttgtttcttacattatctttgttaacccatccgcttttgtgtataatattaagttattttccactactgcaatggctagtaatttacttaggctcagagttttactctgtatggacagagaaataggaggtaacaacagtgggagaacaaataggaacagttcactgggatgttggtccccagaaattggctttcattgaataattcctaaagggtgtcgtgtgctgaattgctttttcatagtgatgtgctgcttcttgttcatactcttatgactttaatttcacctttatctactcccagcctctgtatatgcctacgtttttaaaaataatttttggcactgaagatctgattaccatattttttcagtttaaaaattaaatcctcgcaaatagacctttggtatagttgcattctaccctaggttattttctaggatcaagaatagaacaatttctgttctttccagcattactctttactattcatatgttcttgttcagtgttttgttgttctcatattctaggtggaaatgaagggtaatctctatgttctattttcagttttctaggaaaccagaaaaacatgggtagtagaaatgtatagaaaatgtatgaggtctcttaaccattgtgttaaacttgcattaagcttcttttttagcaatatcgatgtcagtgttacctcttctttcctttttatttattttttttgagacagagtctcattctgtcgcccagactggttggagtgcgatgatgcgatcgcggctaactgcaaccgctgcctcccgggtacaagtgattctcgtgccttgggctcccgagtagctgggatttttagtggagaacaggtttcaccatattggccaggctggtcttgaactcgcaacctcaggtgatccacccacctcagcctccccaargtgttgggattacaggcatgagccaccatacctggccccttttgttgttttgaggggcaggcagtaagaagcagggatttcttcaaatgctagtaagcacaaagagagagagggagaagtttttgtaagtaacgaacagggccgggcatggtggcgtgagaggccgaggtgggcagatcacgaggtcaggagttcgagaccagcctgaccaacatggtgaaacccccgtctccactagaaatgcaaagattagccgggcatggtggtgcacgcctgtaatccagctagtcgggaggctgaggcaggagaatcgcttgaacctgggaggtggaggttgcagggagctgagatcacgccactgcactccagcctgggcgacagagtaagactcccgtctcaaaaaaaaaaaaaaaaaaaaaagaacagttgatcattaaggccattaatgtgcatggacagtttgttgcccaggttggagtgtgatgacgacgcaatctcggtaaatataaacctactctgtaacctccacctcctgggctcargcrgttctcgtgcttcagcctcccgagtagctgggatcacaggcatgcgccactaagcccagctaatttttgtatttttagtrgagacggggtttcaccatgttggccaggctggtcttgaactcctggcctcaagtgatgcgcctgcctgggcctcccaaagtgctgggattacaggtgtgagccactgcgcctggcccaataggcacatttttttaataagtagtttgttgattagaacgaagagcacttgccgtaagtgcatgtcattgttttcagctgttatggctaagtcagttaacctcatcaacaattttttcttctgtaaattgaggacaatttttgcttttatgaatgaagtcttaaccagcaggaagaaatataaacaaaggaacatatttttaatttaatgaagcaaaattccatacatcattttgaaaatagtgtttctttccctgataggcctgttctgcatcattcttttagcttccttctgccctgtttatcacttggtcccacttttatatttttcctcttcggtccagaatttcttatttagtttcttgtattttgcctactccctcccttctccatgattcagcctagtctttccgtcctctgtggacttgggtgtgccttcctctgggccacctcgtcttttgctgctgttagccctcccgcctgcgcacctgccacttcaccctcgcctgtggtccacttacgttccactcagcccggtcagtcctgctttgttcttctccaccgccttggtctcccgtgtgtcttatctagctctggttccttctcgtctccacatttattttgttttcttcctgtgcttgttagtccttgtgcacttggtccttgagctctttttctattaataggtattactagatggatttgttgtctgcctttacatagaacacacatccttactgtgcatttcctgggtagccaggatgaatcaattattattaacttcccttcgaacattgagcttcctctgttttctgtttctaagaattagattagtattctagaagactaatactactttaaagacagtcaaaacagtcatacgctgccatttcagccctttatttaagagtttgtgacatttatcactcccttgaaagattaaagaacacccaaagcaagtttggggtggaggtggggaaggcaggaagagaaaggtaagtgctataaaaggactcattgttaatttctagaaattggactgagatctgaaagcataagccttaacattttttagataaacggtccctgaaaagaataaaaagtatcagtacttccgttaactagctttagtattgggtcatttgtagtttacattctcctttaagttttaagaccttcagtagttaacaaagcagacagagactggccaggcacagtggctcacacctgtaataccagcactttgggaggctgagttgggtggatcacaaggtcaggagattgaaaccatcctggccaacatggtgaaaccccgtctctactaaaaatacaaaaaaaaaaaaaaattagccaggcgtggtggcaggcacctgtggtcccagctactcgggaggctggggcaggagaatttcttgagcccgggaggccgaggttgcagtgagctgagatcgcgccactgcactccagcctgggtgacagcgagactctgtctcaaaaagaaaaaaaaaaaaaaaagcagagacttaatcttgtaaatactcattttatttttgagaggcttaatgtctccttaaatattaacctgtgtcattttgtaattatactgtaatagtgtcagaatgccattaacaaccaacccttttcgtttcttgtgtgggaaagctcataaattgtgtggtcttacccctctggaccctgtagttgtagcattgtgtcttccataaatccattctcaaaatttgcaacagttgagcatatttgaccaaaatgtgccacaggtttctgaagcctgttcaagaagaagcatgtcaacattattggagtaggtcttcgcaatgactacttttgggaagatttgagtaaaatttatggatacagaagttttggagtatgttagaatattactaagtctttttatagttgtaatcccaacactgggttatatatatttaataccaacctgagtatatttcctgaataatatctgttttggagacttggacaaagttaacttttttgcttttttaaaagttgctgtttaaattaacttcctgcatttctaatgtagaaaaaatatggcacagtgatttgaattttgtttatggtttattatcttcctaaattatcagctctttaaaatatgggtctctggcctgtataccatctgataaattaggttgggtaaatttttcacctgaaaaaattcattcttttgacccaggttgtttggcttggaaaaaaaaaatcacatactcattgcatgattaaacttgtccatcagattgtgattttgtgcgttatgaggattgtagctggggtaattttaaaatgttggtatttggatagaactgccagcccaggattttgataaagatcaaaatatatactgtatctaaagtttcttttttaaaagttatttcacttataatcaaaaggtttaaataagtttagtgtatattttatgattagtattattttgtatcgattcagagagaggaaaactgcattcccatagacagggagacttggtgcattaatatccaaagcttagtttaagctggtgatgattagaaaagtggctttcatttgtgttctctggaagattctcagtagtcctgtgggcatgtgaacaagagcatgtgtaatcttcataatgtatgtcttgttagcagaaatgtctgaggcattgctgagatgtaggatgagctgaggtactggttttgtctttcatggttccctattatgttttttgagaaactgagcttttcctgacagtgtttagtttttcttggctatttactatgctattaatagtaacagtttccattatggagcctcagtaggttcttgacatacattaacccattgctattatgtaattttctaataaaatgatgtgataaaacatattttctgtaatatactcatagaatatgtgattataagtaaataaatagatgttggggtagtcctcca

SEQ ID NO: 366 - DNA, 4519 bp, Homo sapien
agccggagagacgcagcggcggccccagtgccgcccccgggcgcgtgagtggagccgggctcctttcccctaccgcgccgcgacccccgcccgggctgcgcgcgccgcctcccgcgagcccccggcccgactcccgggctcccgcgggtgggggccagggctggtcggcgccggcggggctcgcggcggcggcgggttgcgtcccccgcgcctgctggcccacgtggacctggccgtcgcttgccgtgcggcgcctttgcgaaaactcgacggaagtggcagggaccgggcattacctgcgagtgccgggcgcctcctgctccgctgtgcgcgcttggggtgggactcggcgggggaggggtcgtgtacattgtcccaccaggcgcaatgtagccgggcggcgcagaggatttcttttttggtcttgagagcatagagtcccttttcatattcacgtgtactcttaagaaagcgtctgttctccaaactggctttccattctccccgtcctaaatggtgcgtggctgacaccgtagtgttttcaaaactggatatggccaggatgctatagcattgtcagtgcatctccttggaaacaatgccatctttgaatgtgagagataaacctagtttcagcatgtctgcagcagagaccagtacatcaggcttattcccacaggaagcctcctaaagcctgtggcgcggcaaccatttccaggactaaataataatgtgtcagatgcctgtgagtggactgcctggccaaatgactcatgaagatattcacggaagaatagtcaaaaaccaaagaaaaggcatattctagaagcaccttcaattccatcgaggatttttgagcagctgaagaagaaagttctgaaaatatgagtgacaggactccagcacattttttttagttgtttcttacattatctttgttaacccatccgcttttgtgtataatattaagttattttccactactgcaatggctagtaatttacttaggctcagagttttactctgtatggacagagaaataggaggtaacaacagtgggagaacaaataggaacagttcactgggatgttggtccccagaaattggctttcattgaataattcctaaagggtgtcgtgtgctgaattgctttttcatagtgatgtgctgcttcttgttcatactcttatgactttaatttcacctttatctactcccagcctctgtatatgcctacgtttttaaaaataatttttggcactgaagatctgattaccatattttttcagtttaaaaattaaatcctcgcaaatagacctttggtatagttgcattctaccctaggttattttctaggatcaagaatagaacaatttctgttctttccagcattactctttactattcatatgttcttgttcagtgttttgttgttctcatattctaggtggaaatgaagggtaatctctatgttctattttcagttttctaggaaaccagaaaaacatgggtagtagaaatgtatagaaaatgtatgaggtctcttaaccattgtgttaaacttgcattaagcttcttttttagcaatatcgatgtcagtgttacctcttctttcctttttatttattttttttgagacagagtctcattctgtcgcccagactggttggagtgcgatgatgcgatcgcggctaactgcaaccgctgcctcccgggtacaagtgattctcgtgccttgggctcccgagtagctgggatttttagtggagaacaggtttcaccatattggccaggctgagttgggtggatcacaaggtcaggagattgaaaccatcctggccaacatggtgaaaccccgtctctactaaaaatacaaaaaaaaaaaaaaattagccaggcgtggtggcaggcacctgtggtcccagctactcgggaggctggggcaggagaatttcttgagcccgggaggccgaggttgcagtgagctgagatcgcgccactgcactccagcctgggtgacagcgagactctgtctcaaaaagaaaaaaaaaaaaaaaagcagagacttaatcttgtaaatactcattttatttttgagaggcttaatgtctccttaaatattaacctgtgtcattttgtaattatactgtaatagtgtcagaatgccattaacaaccaacccttttcgtttcttgtgtgggaaagctcataaattgtgtggtcttacccctctggaccctgtagttgtagcattgtgaaaatggagcttttggcaaaactttgtattatgctgttgactcacattgtctcatatttttcctttattcttctatattctatgaatatggtgctgtcctgtcatttaattattataatatatgtgaactgctggaggtagactgatgtgagtgcagtttttcaacttaaaaacccttatatatcacattcatggtgtttaagatataagaacagccctacaaagaggggttgattgtattgaagattctttctgctgagcctgccttaattgtgagggtggttgtttgggtatcttagagctaaaagaatggctaagagtccattaatggtcctgtaatattcaccatccctgagcagttagtaaagaatggccgcaaagccacaattaggctactaacaaggaacttatgtagatgtgctaggtccagcctgtgttctggaactatagagatgaataaggtatggtcctttctctctggaggctcacagttgaatagggaatattaatacgtgaatgatagcagtacagtgtggcagatgctaaaatatatgtgtgtagcagctattacaggagaactgattaatagggagagtctggctgggctcagtgactcacccctgtaatcccagcactttgggaggccgaggcgggcagatcacttgaggtcaggagttcgagaccagcctggccaacatggtaaaacctcatctctactaaaaaatacaaagaaaattagcaaggcgtggtggcgggcatctgtaatcccagctactggggaggctgaagcaggagaatcccttgaacccgggaggtgaggttgcagtgagctgagatcatgccactgcactccagcctgggtgacagagtaagactgtctcaaaaacaaaacccaaaatactaaccatatttatagttagtcacctcaccctttttttagttaaaagaagtttatttagcctgatcagtttaccagatgtcttttttagtgacttttgtgtcttccataaatccattctcaaaatttgcaacagttgagcatatttgaccaaaatgtgccacaggtttctgaagcctgttcaagaagaagcatgtcaacattattggagtaggtcttcgcaatgactacttttgggaagatttgagtaaaatttatggatacagaagttttggagtatgttagaatattactaagtctttttatagttgtaatcccaacactgggttatatatatttaataccaacctgagtatatttcctgaataatatctgttttggagacttggacaaagttaacttttttgcttttttaaaagttgctgtttaaattaacttcctgcatttctaatgtagaaaaaatatggcacagtgatttgaattttgtttatggtttattatcttcctaaattatcagctctttaaaatatgggtctctggcctgtataccatctgataaattaggttgggtaaatttttcacctgaaaaaattcattcttttgacccaggttgtttggcttggaaaaaaaaaatcacatactcattgcatgattaaacttgtccatcagattgtgattttgtgcgttatgaggattgtagctggggtaattttaaaatgttggtatttggatagaactgccagcccaggattttgataaagatcaaaatatatactgtatctaaagtttcttttttaaaagttatttcacttataatcaaaaggtttaaataagtttagtgtatattttatgattagtattattttgtatcgattcagagagaggaaaactgcattcccatagacagggagacttggtgcattaatatccaaagcttagtttaagctggtgatgattagaaaagtggctttcatttgtgttctctggaagattctcagtagtcctgtgggcatgtgaacaagagcatgtgtaatcttcataatgtatgtcttgttagcagaaatgtctgaggcattgctgagatgtaggatgagctgaggtactggttttgtctttcatggttccctattatgttttttgagaaactgagcttttcctgacagtgtttagtttttcttggctatttactatgctattaatagtaacagtttccattatggagcctcagtaggttcttgacatacattaacccattgctattatgtaattttctaataaaatgatgtgataaaacatattttctgtaatatactcatagaatatgtgattataagtaaataaatagatgttggggtagtcctcca

SEQ ID NO: 367 - DNA, 4445 bp, Homo sapien
agccggagagacgcagcggcggccccagtgccgcccccgggcgcgtgagtggagccgggctcctttcccctaccgcgccgcgacccccgcccgggctgcgcgcgccgcctcccgcgagcccccggcccgactcccgggctcccgcgggtgggggccagggctggtcggcgccggcggggctcgcggcggcggcgggttgcgtcccccgcgcctgctggcccacgtggacctggccgtcgcttgccgtgcggcgcctttgcgaaaactcgacggaagtggcagggaccgggcattacctgcgagtgccgggcgcctcctgctccgctgtgcgcgcttggggtgggactcggcgggggaggggtcgtgtacattgtcccaccaggcgcaatgtagccgggcggcgcagaggatttcttttttggtcttgagagcatagagtcccttttcatattcacgtgtactcttaagaaagcgtctgttctccaaactggctttccattctccccgtcctaaatggtgcgtggctgacaccgtagtgttttcaaaactggatatggccaggatgctatagcattgtcagtgcatctccttggaaacaatgccatctttgaatgtgagagataaacctagtttcagcatgtctgcagcagagaccagtacatcaggcttattcccacaggaagcctcctaaagcctgtggcgcggcaaccatttccaggactaaataataatgtgtcagatgcctgtgagtggactgcctggccaaatgactcatgaagatattcacggaagaatagtcaaaaaccaaagaaaaggcatattctagaagcaccttcaattccatcgaggatttttgagcagctgaagaagaaagttctgaaaatatgagtgacaggactccagcacattttttttagttgtttcttacattatctttgttaacccatccgcttttgtgtataatattaagttattttccactactgcaatggctagtaatttacttaggctcagagttttactctgtatggacagagaaataggaggtaacaacagtgggagaacaaataggaacagttcactgggatgttggtccccagaaattggctttcattgaataattcctaaagggtgtcgtgtgctgaattgctttttcatagtgatgtgctgcttcttgttcatactcttatgactttaatttcacctttatctactcccagcctctgtatatgcctacgtttttaaaaataatttttggcactgaagatctgattaccatattttttcagtttaaaaattaaatcctcgcaaatagacctttggtatagttgcattctaccctaggttattttctaggatcaagaatagaacaatttctgttctttccagcattactctttactattcatatgttcttgttcagtgttttgttgttctcatattctaggtggaaatgaagggtaatctctatgttctattttcagttttctaggaaaccagaaaaacatgggtagtagaaatgtatagaaaatgtatgaggtctcttaaccattgtgttaaacttgcattaagcttcttttttagcaatatcgatgtcagtgttacctcttctttcctttttatttattttttttgagacagagtctcattctgtcgcccagactggttggagtgcgatgatgcgatcgcggctaactgcaaccgctgcctcccgggtacaagtgattctcgtgccttgggctcccgagtagctgggatttttagtggaacatggtgaaaccccgtctctactaaaaatacaaaaaaaaaaaaaaattagccaggcgtggtggcaggcacctgtggtcccagctactcgggaggctggggcaggagaatttcttgagcccgggaggccgaggttgcagtgagctgagatcgcgccactgcactccagcctgggtgacagcgagactctgtctcaaaaagaaaaaaaaaaaaaaaagcagagacttaatcttgtaaatactcattttatttttgagaggcttaatgtctccttaaatattaacctgtgtcattttgtaattatactgtaatagtgtcagaatgccattaacaaccaacccttttcgtttcttgtgtgggaaagctcataaattgtgtggtcttacccctctggaccctgtagttgtagcattgtgaaaatggagcttttggcaaaactttgtattatgctgttgactcacattgtctcatatttttcctttattcttctatattctatgaatatggtgctgtcctgtcatttaattattataatatatgtgaactgctggaggtagactgatgtgagtgcagtttttcaacttaaaaacccttatatatcacattcatggtgtttaagatataagaacagccctacaaagaggggttgattgtattgaagattctttctgctgagcctgccttaattgtgagggtggttgtttgggtatcttagagctaaaagaatggctaagagtccattaatggtcctgtaatattcaccatccctgagcagttagtaaagaatggccgcaaagccacaattaggctactaacaaggaacttatgtagatgtgctaggtccagcctgtgttctggaactatagagatgaataaggtatggtcctttctctctggaggctcacagttgaatagggaatattaatacgtgaatgatagcagtacagtgtggcagatgctaaaatatatgtgtgtagcagctattacaggagaactgattaatagggagagtctggctgggctcagtgactcacccctgtaatcccagcactttgggaggccgaggcgggcagatcacttgaggtcaggagttcgagaccagcctggccaacatggtaaaacctcatctctactaaaaaatacaaagaaaattagcaaggcgtggtggcgggcatctgtaatcccagctactggggaggctgaagcaggagaatcccttgaacccgggaggtgaggttgcagtgagctgagatcatgccactgcactccagcctgggtgacagagtaagactgtctcaaaaacaaaacccaaaatactaaccatatttatagttagtcacctcaccctttttttagttaaaagaagtttatttagcctgatcagtttaccagatgtcttttttagtgacttttgtgtcttccataaatccattctcaaaatttgcaacagttgagcatatttgaccaaaatgtgccacaggtttctgaagcctgttcaagaagaagcatgtcaacattattggagtaggtcttcgcaatgactacttttgggaagatttgagtaaaatttatggatacagaagttttggagtatgttagaatattactaagtctttttatagttgtaatcccaacactgggttatatatatttaataccaacctgagtatatttcctgaataatatctgttttggagacttggacaaagttaacttttttgcttttttaaaagttgctgtttaaattaacttcctgcatttctaatgtagaaaaaatatggcacagtgatttgaattttgtttatggtttattatcttcctaaattatcagctctttaaaatatgggtctctggcctgtataccatctgataaattaggttgggtaaatttttcacctgaaaaaattcattcttttgacccaggttgtttggcttggaaaaaaaaaatcacatactcattgcatgattaaacttgtccatcagattgtgattttgtgcgttatgaggattgtagctggggtaattttaaaatgttggtatttggatagaactgccagcccaggattttgataaagatcaaaatatatactgtatctaaagtttcttttttaaaagttatttcacttataatcaaaaggtttaaataagtttagtgtatattttatgattagtattattttgtatcgattcagagagaggaaaactgcattcccatagacagggagacttggtgcattaatatccaaagcttagtttaagctggtgatgattagaaaagtggctttcatttgtgttctctggaagattctcagtagtcctgtgggcatgtgaacaagagcatgtgtaatcttcataatgtatgtcttgttagcagaaatgtctgaggcattgctgagatgtaggatgagctgaggtactggttttgtctttcatggttccctattatgttttttgagaaactgagcttttcctgacagtgtttagtttttcttggctatttactatgctattaatagtaacagtttccattatggagcctcagtaggttcttgacatacattaacccattgctattatgtaattttctaataaaatgatgtgataaaacatattttctgtaatatactcatagaatatgtgattataagtaaataaatagatgttggggtagtcctcca

SEQ ID NO: 368 - DNA, 4294 bp, Homo sapien
agccggagagacgcagcggcggccccagtgccgcccccgggcgcgtgagtggagccgggctcctttcccctaccgcgccgcgacccccgcccgggctgcgcgcgccgcctcccgcgagcccccggcccgactcccgggctcccgcgggtgggggccagggctggtcggcgccggcggggctcgcggcggcggcgggttgcgtcccccgcgcctgctggcccacgtggacctggccgtcgcttgccgtgcggcgcctttgcgaaaactcgacggaagtggcagggaccgggcattacctgcgagtgccgggcgcctcctgctccgctgtgcgcgcttggggtgggactcggcgggggaggggtcgtgtacattgtcccaccaggcgcaatgtagccgggcggcgcagaggatttcttttttggtcttgagagcatagagtcccttttcatattcacgtgtactcttaagaaagcgtctgttctccaaactggctttccattctccccgtcctaaatggtgcgtggctgacaccgtagtgttttcaaaactggatatggccaggatgctatagcattgtcagtgcatctccttggaaacaatgccatctttgaatgtgagagataaacctagtttcagcatgtctgcagcagagaccagtacatcaggcttattcccacaggaagcctcctaaagcctgtggcgcggcaaccatttccaggactaaataataatgtgtcagatgcctgtgagtggactgcctggccaaatgactcatgaagatattcacggaagaatagtcaaaaaccaaagaaaaggcatattctagaagcaccttcaattccatcgaggatttttgagcagctgaagaagaaagttctgaaaatatgagtgacaggactccagcacattttttttagttgtttcttacattatctttgttaacccatccgcttttgtgtataatattaagttattttccactactgcaatggctagtaatttacttaggctcagagttttactctgtatggacagagaaataggaggtaacaacagtgggagaacaaataggaacagttcactgggatgttggtccccagaaattggctttcattgaataattcctaaagggtgtcgtgtgctgaattgctttttcatagtgatgtgctgcttcttgttcatactcttatgactttaatttcacctttatctactcccagcctctgtatatgcctacgtttttaaaaataatttttggcactgaagatctgattaccatattttttcagtttaaaaattaaatcctcgcaaatagacctttggtatagttgcattctaccctaggttattttctaggatcaagaatagaacaatttctgttctttccagcattactctttactattcatatgttcttgttcagtgttttgttgttctcatattctaggtggaaatgaagggtaatctctatgttctattttcagttttctaggaaaccagaaaaacatgggtagtagaaatgtatagaaaatgtatgaggtctcttaaccattgtgttaaacttgcattaagcttcttttttagcaatatcgatgtcagtgttacctcttctttcctttttatttattttttttgagacagagtctcattctgtcgcccagactggttggagtgcgatgatgcgatcgcggctaactgcaaccgctgcctcccgggtacaagagaatttcttgagcccgggaggccgaggttgcagtgagctgagatcgcgccactgcactccagcctgggtgacagcgagactctgtctcaaaaagaaaaaaaaaaaaaaaagcagagacttaatcttgtaaatactcattttatttttgagaggcttaatgtctccttaaatattaacctgtgtcattttgtaattatactgtaatagtgtcagaatgccattaacaaccaacccttttcgtttcttgtgtgggaaagctcataaattgtgtggtcttacccctctggaccctgtagttgtagcattgtgaaaatggagcttttggcaaaactttgtattatgctgttgactcacattgtctcatatttttcctttattcttctatattctatgaatatggtgctgtcctgtcatttaattattataatatatgtgaactgctggaggtagactgatgtgagtgcagtttttcaacttaaaaacccttatatatcacattcatggtgtttaagatataagaacagccctacaaagaggggttgattgtattgaagattctttctgctgagcctgccttaattgtgagggtggttgtttgggtatcttagagctaaaagaatggctaagagtccattaatggtcctgtaatattcaccatccctgagcagttagtaaagaatggccgcaaagccacaattaggctactaacaaggaacttatgtagatgtgctaggtccagcctgtgttctggaactatagagatgaataaggtatggtcctttctctctggaggctcacagttgaatagggaatattaatacgtgaatgatagcagtacagtgtggcagatgctaaaatatatgtgtgtagcagctattacaggagaactgattaatagggagagtctggctgggctcagtgactcacccctgtaatcccagcactttgggaggccgaggcgggcagatcacttgaggtcaggagttcgagaccagcctggccaacatggtaaaacctcatctctactaaaaaatacaaagaaaattagcaaggcgtggtggcgggcatctgtaatcccagctactggggaggctgaagcaggagaatcccttgaacccgggaggtgaggttgcagtgagctgagatcatgccactgcactccagcctgggtgacagagtaagactgtctcaaaaacaaaacccaaaatactaaccatatttatagttagtcacctcaccctttttttagttaaaagaagtttatttagcctgatcagtttaccagatgtcttttttagtgacttttgtgtcttccataaatccattctcaaaatttgcaacagttgagcatatttgaccaaaatgtgccacaggtttctgaagcctgttcaagaagaagcatgtcaacattattggagtaggtcttcgcaatgactacttttgggaagatttgagtaaaatttatggatacagaagttttggagtatgttagaatattactaagtctttttatagttgtaatcccaacactgggttatatatatttaataccaacctgagtatatttcctgaataatatctgttttggagacttggacaaagttaacttttttgcttttttaaaagttgctgtttaaattaacttcctgcatttctaatgtagaaaaaatatggcacagtgatttgaattttgtttatggtttattatcttcctaaattatcagctctttaaaatatgggtctctggcctgtataccatctgataaattaggttgggtaaatttttcacctgaaaaaattcattcttttgacccaggttgtttggcttggaaaaaaaaaatcacatactcattgcatgattaaacttgtccatcagattgtgattttgtgcgttatgaggattgtagctggggtaattttaaaatgttggtatttggatagaactgccagcccaggattttgataaagatcaaaatatatactgtatctaaagtttcttttttaaaagttatttcacttataatcaaaaggtttaaataagtttagtgtatattttatgattagtattattttgtatcgattcagagagaggaaaactgcattcccatagacagggagacttggtgcattaatatccaaagcttagtttaagctggtgatgattagaaaagtggctttcatttgtgttctctggaagattctcagtagtcctgtgggcatgtgaacaagagcatgtgtaatcttcataatgtatgtcttgttagcagaaatgtctgaggcattgctgagatgtaggatgagctgaggtactggttttgtctttcatggttccctattatgttttttgagaaactgagcttttcctgacagtgtttagtttttcttggctatttactatgctattaatagtaacagtttccattatggagcctcagtaggttcttgacatacattaacccattgctattatgtaattttctaataaaatgatgtgataaaacatattttctgtaatatactcatagaatatgtgattataagtaaataaatagatgttggggtagtcctcca

SEQ ID NO: 369 - DNA, 942 bp, Homo sapien
aaaaacatcatttggaaaaaaaatcattttccaatctacactttccttttagaaggcttaacatttgccttctaatatactgtaaggtaatgagcttcagaacaggcaacctgaccctgcagaggtcgcgtgctgtgggatgacagcgggacgggagctcacaagtgctttcactgaagatttgttcatatactgtgtattgattgttgtgtaatatatcatcattgcttttgtaaatacgtaaaactgtaattttttaatggtgtgcttcccttatacttttttgatcagagaattttggaaagtaccaaagaagcaggggaatcattggccagtgttacgttttcacattgtctgtctcccaccctcactgatcacgcctgccccagagcagtgtgtggcggtgacaccgtcacccagcatgcgccacgccgtggctcccaccagcagtgccaccgccaccacaccccagatcccacccaccttgcagtggcctttccttgtcatcagagtagagaatgcacaggtgttggtgagggcgtgtggctgagcactacatgtcaagtccagagtcagtttctatcccaattctccctgcagcctgaagaacggatccttgtctccaatgtcagcacaaaggaggctttttctgtgctttgacattctagcacttcagggatgagagggagggagaatcctggatgctggatggagtatttctctgaggcccacacaaagctggacacccccaggctctactccatcccattggagtctcttctttttttgatagcgggagggaggaagtacgactaatgttggagcctgaaactatggaaatgctgctaaaatttttatattgacaaacattttcttggtacttcattgtcatttttcattaatcaaccatattaaatttataataaaaaatgcccctcagaa

SEQ ID NO: 370 - DNA, 4210 bp, Homo sapien
aggaagagaaaggtaagtgctataaaaggactcattgktaatttctagaaattggactgagatctgaaagcataagccttaacattttttagataaacggtccctgaaaagaataaaaagtatcagtacttccgttaactagctttagtattgggtcatttgtagttwacattctcctttaagttttaagaccttcagtagttaacaaagcagacagagactgcgcctggcccaataggcacatttttttaataagtagtttgttgattagaacgaagagcacttgccgtaagtgcatgtcattgttttcagctgttatggctaagtcagttaacctcatcaacaattttttcttctgtaaattgaggacaatttttgcttttatgaatgaagtcttaaccagcaggaagaaatataaacaaaggaacatatttttaatttaatgaagcaaaattccatacatcattttgaaaatagtgtttctttccctgataggcctgttctgcatcattcttttagcttccttctgccctgtttatcacttggtcccacttttatatttttcctcttcggtccagaatttcttatttagtttcttgtattttgcctactccctcccttctccatgattcagcctagtctttccgtcctctgtggacttgggtgtgccttcctctgggccacctcgtcttttgctgctgttagccctcccgcctgcgcacctgccacttcaccctcgcctgtggtccacttacgttccactcagcccggtcagtcctgctttgttcttctccaccgccttggtctcccgtgtgtcttatctagctctggttccttctcgtctccacatttattttgttttcttcctgtgcttgttagtccttgtgcacttggtccttgagctctttttctattaataggtattactagatggatttgttgtctgcctttacatagaacacacatccttactgtgcatttcctgggtagccaggatgaatcaattattattaacttcccttcgaacattgagcttcctctgttttctgtttctaagaattagattagtattctagaagactaatactactttaaagacagtcaaaacagtcatacgctgccatttcagccctttatttaagagtttgtgacatttatcactcccttgaaagattaaagaacacccaaagcaagtttggggtggaggtggggaaggcaggaagagaaaggtaagtgctataaaaggactcattgttaatttctagaaattggactgagatctgaaagcataagccttaacattttttagataaacggtccctgaaaagaataaaaagtatcagtacttccgttaactagctttagtattgggtcatttgtagtttacattctcctttaagttttaagaccttcagtagttaacaaagcagacagagactggccaggcacagtggctcacacctgtaataccagcactttgggaggctgagttgggtggatcacaaggtcaggagattgaaaccatcctggccaacatggtgaaaccccgtctctactaaaaatacaaaaaaaaaaaaaaattagccaggcgtggtggcaggcacctgtggtcccagctactcgggaggctggggcaggagaatttcttgagcccgggaggccgaggttgcagtgagctgagatcgcgccactgcactccagcctgggtgacagcgagactctgtctcaaaaagaaaaaaaaaaaaaaaagcagagacttaatcttgtaaatactcattttatttttgagaggcttaatgtctccttaaatattaacctgtgtcattttgtaattatactgtaatagtgtcagaatgccattaacaaccaacccttttcgtttcttgtgtgggaaagctcataaattgtgtggtcttacccctctggaccctgtagttgtagcattgtgaaaatggagcttttggcaaaactttgtattatgctgttgactcacattgtctcatatttttcctttattcttctatattctatgaatatggtgctgtcctgtcatttaattattataatatatgtgaactgctggaggtagactgatgtgagtgcagtttttcaacttaaaaacccttatatatcacattcatggtgtttaagatataagaacagccctacaaagaggggttgattgtattgaagattctttctgctgagcctgccttaattgtgagggtggttgtttgggtatcttagagctaaaagaatggctaagagtccattaatggtcctgtaatattcaccatccctgagcagttagtaaagaatggccgcaaagccacaattaggctactaacaaggaacttatgtagatgtgctaggtccagcctgtgttctggaactatagagatgaataaggtatggtcctttctctctggaggctcacagttgaatagggaatattaatacgtgaatgatagcagtacagtgtggcagatgctaaaatatatgtgtgtagcagctattacaggagaactgattaatagggagagtctggctgggctcagtgactcacccctgtaatcccagcactttgggaggccgaggcgggcagatcacttgaggtcaggagttcgagaccagcctggccaacatggtaaaacctcatctctactaaaaaatacaaagaaaattagcaaggcgtggtggcgggcatctgtaatcccagctactggggaggctgaagcaggagaatcccttgaacccgggaggtgaggttgcagtgagctgagatcatgccactgcactccagcctgggtgacagagtaagactgtctcaaaaacaaaacccaaaatactaaccatatttatagttagtcacctcaccctttttttagttaaaagaagtttatttagcctgatcagtttaccagatgtcttttttagtgacttttgtgtcttccataaatccattctcaaaatttgcaacagttgagcatatttgaccaaaatgtgccacaggtttctgaagcctgttcaagaagaagcatgtcaacattattggagtaggtcttcgcaatgactacttttgggaagatttgagtaaaatttatggatacagaagttttggagtatgttagaatattactaagtctttttatagttgtaatcccaacactgggttatatatatttaataccaacctgagtatatttcctgaataatatctgttttggagacttggacaaagttaacttttttgcttttttaaaagttgctgtttaaattaacttcctgcatttctaatgtagaaaaaatatggcacagtgatttgaattttgtttatggtttattatcttcctaaattatcagctctttaaaatatgggtctctggcctgtataccatctgataaattaggttgggtaaatttttcacctgaaaaaattcattcttttgacccaggttgtttggcttggaaaaaaaaaatcacatactcattgcatgattaaacttgtccatcagattgtgattttgtgcgttatgaggattgtagctggggtaattttaaaatgttggtatttggatagaactgccagcccaggattttgataaagatcaaaatatatactgtatctaaagtttcttttttaaaagttatttcacttataatcaaaaggtttaaataagtttagtgtatattttatgattagtattattttgtatcgattcagagagaggaaaactgcattcccatagacagggagacttggtgcattaatatccaaagcttagtttaagctggtgatgattagaaaagtggctttcatttgtgttctctggaagattctcagtagtcctgtgggcatgtgaacaagagcatgtgtaatcttcataatgtatgtcttgttagcagaaatgtctgaggcattgctgagatgtaggatgagctgaggtactggttttgtctttcatggttccctattatgttttttgagaaactgagcttttcctgacagtgtttagtttttcttggctatttactatgctattaatagtaacagtttccattatggagcctcagtaggttcttgacatacattaacccattgctattatgtaattttctaataaaatgatgtgataaaacatattttctgtaatatactcatagaatatgtgattataagtaaataaatagatgttggggtagtcctcca

SEQ ID NO: 371 - DNA, 4690 bp, Homo sapien
agccggagagacgcagcggcggccccagtgccgcccccgggcgcgtgagtggagccgggctcctttcccctaccgcgccgcgacccccgcccgggctgcgcgcgccgcctcccgcgagcccccggcccgactcccgggctcccgcgggtgggggccagggctggtcggcgccggcggggctcgcggcggcggcgggttgcgtcccccgcgcctgctggcccacgtggacctggccgtcgcttgccgtgcggcgcctttgcgaaaactcgacggaagtggcagggaccgggcattacctgcgagtgccgggcgcctcctgctccgctgtgcgcgcttggggtgggactcggcgggggaggggtcgtgtacattgtcccaccaggcgcaatgtagccgggcggcgcagaggatttcttttttggtcttgagagcatagagtcccttttcatattcacgtgtactcttaagaaagcgtctgttctccaaactggctttccattctccccgtcctaaatggtgcgtggctgacaccgtagtgttttcaaaactggatatggccaggatgctatagcattgtcagtgcatctccttggaaacaatgccatctttgaatgtgagagataaacctagtttcagcatgtctgcagcagagaccagtacatcaggcttattcccacaggaagcctcctaaagcctgtggcgcggcaaccatttccaggactaaataataatgtgtcagatgcctgtgagtggactgcctggccaaatgactcatgaagatattcacggaagaatagtcaaaaaccaaagaaaaggcatattctagaagcaccttcaattccatcgaggatttttgagcagctgaagaagaaagttctgaaaatatgagtgacaggactccagcacattttttttagttgtttcttacattatctttgttaacccatccgcttttgtgtataatattaagttattttccactactgcaatggctagtaatttacttaggctcagagttttactctgtatggacagagaaataggaggtaacaacagtgggagaacaaataggaacagttcactgggatgttggtccccagaaattggctttcattgaataattcctaaagggtgtcgtgtgctgaattgctttttcatagtgatgtgctgcttcttgttcatactcttatgactttaatttcacctttatctactcccagcctctgtatatgcctacgtttttaaaaataatttttggcactgaagatctgattaccatattttttcagtttaaaaattaaatcctcgcaaatagacctttggtatagttgcattctaccctaggttattttctaggatcaagaatagaacaatttctgttctttccagcattactctttactattcatatgttcttgttcagtgttttgttgttctcatattctaggtggaaatgaagggtaatctctatgttctattttcagttttctaggaaaccagaaaaacatgggtagtagaaatgtatagaaaatgtatgaggtctcttaaccattgtgttaaacttgcattaagcttcttttttagcaatatcgatgtcagtgttacctcttctttcctttttatttattttttttgagacagagtctcattctgtcgcccagactggttggagtgcgatgatgcgatcgcggctaactgcaaccgctgcctcccgggtacaagtgattctcgtgccttgggctcccgagtagctgggatttttagtggagaacaggtttcaccatattggccaggctggtcttgaactcgcaacctcaggtgatccacccacctcagcctccccaargtgttgggattacaggcatgagccaccatacctggccccttttgttgttttgaggggcaggcagtaagaagcagggatttcttcaaatgctagtaagcacaaagagagagagggagaagtttttgtaagtaacgaacagggccgggcatggtggcgtgagaggccgaggtgggcagatcacgaggtcaggagttcgagaccagcctgaccaacatggtgaaacccccgtctccactagaaatgcaaagattagccgggcatggtggtgcacgcctgtaatccagctagtcgggaggctgaggcaggagaatcgcttgaacctgggaggtggaggttgcagggagctgagatcacgccactgcactccagcctgggcgacagagtaagactcccgtctcaaaaaaaaaaaaaaaaaaaaaagaacagttgatcattaaggccattaatgtgcatggacagtttgttgcccaggttggagtgtgatgacgacgcaatctcggtaaatataaacctactctgtaacctccacctcctgggctcargcrgttctcgtgcttcagcctcccgagtagctgggatcacaggcatgcgccactaagcccagctaatttttgtatttttagtrgagacggggtttcaccatgttggccaggctggtcttgaactcctggcctcaagtgatgcgcctgcctgggcctcccaaagtgctgggattacaggtgtgagccactgcgcctggcccaataggcacatttttttaataagtagtttgttgattagaacgaagagcacttgccgtaagtgcatgtcattgttttcagctgttatggctaagtcagttaacctcatcaacaattttttcttctgtaaattgaggacaatttttgcttttatgaatgaagtcttaaccagcaggaagaaatataaacaaaggaacatatttttaatttaatgaagcaaaattccatacatcattttgaaaatagtgtttctttccctgataggcctgttctgcatcattcttttagcttccttctgccctgtttatcacttggtcccacttttatatttttcctcttcggtccagaatttcttatttagtttcttgtattttgcctactccctcccttctccatgattcagcctagtctttccgtcctctgtggacttgggtgtgccttcctctgggccacctcgtcttttgctgctgttagccctcccgcctgcgcacctgccacttcaccctcgcctgtggtccacttacgttccactcagcccggtcagtcctgctttgttcttctccaccgccttggtctcccgtgtgtcttatctagctctggttccttctcgtctccacatttattttgttttcttcctgtgcttgttagtccttgtgcacttggtccttgagctctttttctattaataggtattactagatggatttgttgtctgcctttacatagaacacacatccttactgtgcatttcctgggtagccaggatgaatcaattattattaacttcccttcgaacattgagcttcctctgttttctgtttctaagaattagattagtattctagaagactaatactactttaaagacagtcaaaacagtcatacgctgccatttcagccctttatttaagagtttgtgacatttatcactcccttgaaagattaaagaacacccaaagcaagtttggggtggaggtggggaaggcaggaagagaaaggtaagtgctataaaaggactcattgttaatttctagaaattggactgagatctgaaagcataagccttaacattttttagataaacggtccctgaaaagaataaaaagtatcagtacttccgttaactagctttagtattgggtcatttgtagtttacattctcctttaagttttaagaccttcagtagttaacaaagcagacagagactggccaggcacagtggctcacacctgtaataccagcactttgggaggctgagttgggtggatcacaaggtcaggagattgaaaccatcctggccaacatggtgaaaccccgtctctactaaaaatacaaaaaaaaaaaaaaattagccaggcgtggtggcaggcacctgtggtcccagctactcgggaggctggggcaggagaatttcttgagcccgggaggccgaggttgcagtgagctgagatcgcgccactgcactccagcctgggtgacagcgagactctgtctcaaaaagaaaaaaaaaaaaaaaagcagagacttaatcttgtaaatactcattttatttttgagaggcttaatgtctccttaaatattaacctgtgtcattttgtaattatactgtaatagtgtcagaatgccattaacaaccaacccttttcgtttcttgtgtgggaaagctcataaattgtgtggtcttacccctctggaccctgtagttgtagcattgtgaaaatggagcttttggcaaaactttgtattatgctgttgactcacattgtctcatatttttcctttattcttctatattctatgaatatggtgctgtcctgtcatttaattattataatatatgtgaactgctggaggtagactgatgtgagtgcagtttttcaacttaaaaacccttatatatcacattcatggtgtttaagatataagaacagccctacaaagaggggttgattgtattgaagattctttctgctgagcctgccttaattgtgagggtggttgtttgggtatcttagagctaaaagaatgccaagcagtcgtcgcaaccggacggggagcacgccaagccgggaccacagcctgcaggtgtggttgtctgtcatg

SEQ ID NO: 372 - DNA, 3950 bp, Homo sapien
agaggcttaatgtctccttaaatattaacctgtgtcatttgtaattatactgtaatagtgtcagaatgccattaacaaccaacccttttcgtttcttgtgtgggaaagctcataaattgtgtggtcttacccctctggaccctgtagttgtagcattgtgtcttccataaatccattctcaaaatttgcaacagttgagcatatttgaccaaaatgtgccacaggtttctgataggcctgttctgcatcattcttttagcttccttctgccctgtttatcacttggtcccacttttatatttttcctcttcggtccagaatttcttatttagtttcttgtattttgcctactccctcccttctccatgattcagcctagtctttccgtcctctgtggacttgggtgtgccttcctctgggccacctcgtcttttgctgctgttagccctcccgcctgcgcacctgccacttcaccctcgcctgtggtccacttacgttccactcagcccggtcagtcctgctttgttcttctccaccgccttggtctcccgtgtgtcttatctagctctggttccttctcgtctccacatttattttgttttcttcctgtgcttgttagtccttgtgcacttggtccttgagctctttttctattaataggtattactagatggatttgttgtctgcctttacatagaacacacatccttactgtgcatttcctgggtagccaggatgaatcaattattattaacttcccttcgaacattgagcttcctctgttttctgtttctaagaattagattagtattctagaagactaatactactttaaagacagtcaaaacagtcatacgctgccatttcagccctttatttaagagtttgtgacatttatcactcccttgaaagattaaagaacacccaaagcaagtttggggtggaggtggggaaggcaggaagagaaaggtaagtgctataaaaggactcattgttaatttctagaaattggactgagatctgaaagcataagccttaacattttttagataaacggtccctgaaaagaataaaaagtatcagtacttccgttaactagctttagtattgggtcatttgtagtttacattctcctttaagttttaagaccttcagtagttaacaaagcagacagagactggccaggcacagtggctcacacctgtaataccagcactttgggaggctgagttgggtggatcacaaggtcaggagattgaaaccatcctggccaacatggtgaaaccccgtctctactaaaaatacaaaaaaaaaaaaaaattagccaggcgtggtggcaggcacctgtggtcccagctactcgggaggctggggcaggagaatttcttgagcccgggaggccgaggttgcagtgagctgagatcgcgccactgcactccagcctgggtgacagcgagactctgtctcaaaaagaaaaaaaaaaaaaaaagcagagacttaatcttgtaaatactcattttatttttgagaggcttaatgtctccttaaatattaacctgtgtcattttgtaattatactgtaatagtgtcagaatgccattaacaaccaacccttttcgtttcttgtgtgggaaagctcataaattgtgtggtcttacccctctggaccctgtagttgtagcattgtgaaaatggagcttttggcaaaactttgtattatgctgttgactcacattgtctcatatttttcctttattcttctatattctatgaatatggtgctgtcctgtcatttaattattataatatatgtgaactgctggaggtagactgatgtgagtgcagtttttcaacttaaaaacccttatatatcacattcatggtgtttaagatataagaacagccctacaaagaggggttgattgtattgaagattctttctgctgagcctgccttaattgtgagggtggttgtttgggtatcttagagctaaaagaatggctaagagtccattaatggtcctgtaatattcaccatccctgagcagttagtaaagaatggccgcaaagccacaattaggctactaacaaggaacttatgtagatgtgctaggtccagcctgtgttctggaactatagagatgaataaggtatggtcctttctctctggaggctcacagttgaatagggaatattaatacgtgaatgatagcagtacagtgtggcagatgctaaaatatatgtgtgtagcagctattacaggagaactgattaatagggagagtctggctgggctcagtgactcacccctgtaatcccagcactttgggaggccgaggcgggcagatcacttgaggtcaggagttcgagaccagcctggccaacatggtaaaacctcatctctactaaaaaatacaaagaaaattagcaaggcgtggtggcgggcatctgtaatcccagctactggggaggctgaagcaggagaatcccttgaacccgggaggtgaggttgcagtgagctgagatcatgccactgcactccagcctgggtgacagagtaagactgtctcaaaaacaaaacccaaaatactaaccatatttatagttagtcacctcaccctttttttagttaaaagaagtttatttagcctgatcagtttaccagatgtcttttttagtgacttttgtgtcttccataaatccattctcaaaatttgcaacagttgagcatatttgaccaaaatgtgccacaggtttctgaagcctgttcaagaagaagcatgtcaacattattggagtaggtcttcgcaatgactacttttgggaagatttgagtaaaatttatggatacagaagttttggagtatgttagaatattactaagtctttttatagttgtaatcccaacactgggttatatatatttaataccaacctgagtatatttcctgaataatatctgttttggagacttggacaaagttaacttttttgcttttttaaaagttgctgtttaaattaacttcctgcatttctaatgtagaaaaaatatggcacagtgatttgaattttgtttatggtttattatcttcctaaattatcagctctttaaaatatgggtctctggcctgtataccatctgataaattaggttgggtaaatttttcacctgaaaaaattcattcttttgacccaggttgtttggcttggaaaaaaaaaatcacatactcattgcatgattaaacttgtccatcagattgtgattttgtgcgttatgaggattgtagctggggtaattttaaaatgttggtatttggatagaactgccagcccaggattttgataaagatcaaaatatatactgtatctaaagtttcttttttaaaagttatttcacttataatcaaaaggtttaaataagtttagtgtatattttatgattagtattattttgtatcgattcagagagaggaaaactgcattcccatagacagggagacttggtgcattaatatccaaagcttagtttaagctggtgatgattagaaaagtggctttcatttgtgttctctggaagattctcagtagtcctgtgggcatgtgaacaagagcatgtgtaatcttcataatgtatgtcttgttagcagaaatgtctgaggcattgctgagatgtaggatgagctgaggtactggttttgtctttcatggttccctattatgttttttgagaaactgagcttttcctgacagtgtttagtttttcttggctatttactatgctattaatagtaacagtttccattatggagcctcagtaggttcttgacatacattaacccattgctattatgtaattttctaataaaatgatgtgataaaacatattttctgtaatatactcatagaatatgtgattataagtaaataaatagatgttggggtagtcctcca

SEQ ID NO: 373 - DNA, 4274 bp, Homo sapien
agccggagagacgcagcggcggccccagtgccgcccccgggcgcgtgagtggagccgggctcctttcccctaccgcgccgcgacccccgcccgggctgcgcgcgccgcctcccgcgagcccccggcccgactcccgggctcccgcgggtgggggccagggctggtcggcgccggcggggctcgcggcggcggcgggttgcgtcccccgcgcctgctggcccacgtggacctggccgtcgcttgccgtgcggcgcctttgcgaaaactcgacggaagtggcagggaccgggcattacctgcgagtgccgggcgcctcctgctccgctgtgcgcgcttggggtgggactcggcgggggaggggtcgtgtacattgtcccaccaggcgcaatgtagccgggcggcgcagaggatttcttttttggtcttgagagcatagagtcccttttcatattcacgtgtactcttaagaaagcgtctgttctccaaactggctttccattctccccgtcctaaatggtgcgtggctgacaccgtagtgttttcaaaactggatatggccaggatgctatagcattgtcagtgcatctccttggaaacaatgccatctttgaatgtgagagataaacctagtttcagcatgtctgcagcagagaccagtacatcaggcttattcccacaggaagcctcctaaagcctgtggcgcggcaaccatttccaggactaaataataatgtgtcagatgcctgtgagtggactgcctggccaaatgactcatgaagatattcacggaagaatagtcaaaaaccaaagaaaaggcatattctagaagcaccttcaattccatcgaggatttttgagcagctgaagaagaaagttctgaaaatatgagtgacaggactccagcacattttttttagttgtttcttacattatctttgttaacccatccgcttttgtgtataatattaagttattttccactactgcaatggctagtaatttacttaggctcagagttttactctgtatggacagagaaataggaggtaacaacagtgggagaacaaataggaacagttcactgggatgttggtccccagaaattggctttcattgaataattcctaaagggtgtcgtgtgctgaattgctttttcatagtgatgtgctgcttcttgttcatactcttatgactttaatttcacctttatctactcccagcctctgtatatgcctacgtttttaaaaataatttttggcactgaagatctgattaccatattttttcagtttaaaaattaaatcctcgcaaatagacctttggtatagttgcattctaccctaggttattttctaggatcaagaatagaacaatttctgttctttccagcattactctttactattcatatgttcttgttcagtgttttgttgttctcatattctaggtggaaatgaagggtaatctctatgttctattttcagttttctaggaaaccagaaaaacatgggtagtagaaatgtatagaaaatgtatgaggtctcttaaccattgtgttaaacttgcattaagcttcttttttagcaatatcgatgtcagtgttacctcttctttcctttttatttattttttttgagacagagtctcattctgtcgcccagactggttggagtgcgatgatgcgatcgcggctaactgcaaccgctgcctcccgggtacaagtgattctcgtgccttgggctcccgagtagctgggatttttagtggagaacaggtttcaccatattggccaggctggtcttgaactcgcaacctcaggtgatccacccacctcagcctccccaargtgttgggattacaggcatgagccaccatacctggccccttttgttgttttgaggggcaggcagtaagaagcagggatttcttcaaatgctagtaagcacaaagagagagagggagaagtttttgtaagtaacgaacagggccgggcatggtggcgtgagaggccgaggtgggcagatcacgaggtcaggagttcgagaccagcctgaccaacatggtgaaacccccgtctccactagaaatgcaaagattagccgggcatggtggtgcacgcctgtaatccagctagtcgggaggctgaggcaggagaatcgcttgaacctgggaggtggaggttgcagggagctgagatcacgccactgcactccagcctgggcgacagagtaagactcccgtctcaaaaaaaaaaaaaaaaaaaaaagaacagttgatcattaaggccattaatgtgcatggacagtttgttgcccaggttggagtgtgatgacgacgcaatctcggtaaatataaacctactctgtaacctccacctcctgggctcargcrgttctcgtgcttcagcctcccgagtagctgggatcacaggcatgcgccactaagcccagctaatttttgtatttttagtrgagacggggtttcaccatgttggccaggctggtcttgaactcctggcctcaagtgatgcgcctgcctgggcctcccaaagtgctgggattacaggtgtgagccactgcgcctggcccaataggcacatttttttaataagtagtttgttgattagaacgaagagcacttgccgtaagtgcatgtcattgttttcagctgttatggctaagtcagttaacctcatcaacaattttttcttctgtaaattgaggacaatttttgcttttatgaatgaagtcttaaccagcaggaagaaatataaacaaaggaacatatttttaatttaatgaagcaaaattccatacatcattttgaaaatagtgtttctttccctgataggcctgttctgcatcattcttttagcttccttctgccctgtttatcacttggtcccacttttatatttttcctcttcggtccagaatttcttatttagtttcttgtattttgcctactccctcccttctccatgattcagcctagtctttccgtcctctgtggacttgggtgtgccttcctctgggccacctcgtcttttgctgctgttagccctcccgcctgcgcacctgccacttcaccctcgcctgtggtccacttacgttccactcagcccggtcagtcctgctttgttcttctccaccgccttggtctcccgtgtgtcttatctagctctggttccttctcgtctccacatttattttgttttcttcctgtgcttgttagtccttgtgcacttggtccttgagctctttttctattaataggtattactagatggatttgttgtctgcctttacatagaacacacatccttactgtgcatttcctgggtagccaggatgaatcaattattattaacttcccttcgaacattgagcttcctctgttttctgtttctaagaattagattagtattctagaagactaatactactttaaagacagtcaaaacagtcatacgctgccatttcagccctttatttaagagtttgtgacatttatcactcccttgaaagattaaagaacacccaaagcaagtttggggtggaggtggggaaggcaggaagagaaaggtaagtgctataaaaggactcattgttaatttctagaaattggactgagatctgaaagcataagccttaacattttttagataaacggtccctgaaaagaataaaaagtatcagtattttttaaaaatgctgccaaggtgatacttctgttaagccaagactgagaaccactgaactaacaggaacagcgtctgtgctcaaatttcagcaccttacagtttgagtacagtgcctgcatctgtcctctgtgcattagactactgtgcgttccacatagcttttatttatggctctgctgagattagtattttcctgagggtggggaaaatcacccttgtgaatggtggacacatttaaacttcaggtcacagctttaatatgtacagcagaatagtgcttatgcagtggaatcaaatacccaaaacagtgagaaattcagaatcactgagtagtcaaaaaggaaagtgggcttcatctactttgaagtgggatgggtgggaaactttttgggaaattgagcatctagaaaacctgtgtggagtgtggggctgagccatcttgagtactgacagggcctattgtgggccacattcttctctttttctagcttaattctttactttgtaaaactatttacttgtaacaagtgaaagtatacacggatgaataaaaaacaagagttaatgtccc

SEQ ID NO: 374 - DNA, 3024 bp, Homo sapien
agccggagagacgcagcggcggccccagtgccgcccccgggcgcgtgagtggagccgggctcctttcccctaccgcgccgcgacccccgcccgggctgcgcgcgccgcctcccgcgagcccccggcccgactcccgggctcccgcgggtgggggccagggctggtcggcgccggcggggctcgcggcggcggcgggttgcgtcccccgcgcctgctggcccacgtggacctggccgtcgcttgccgtgcggcgcctttgcgaaaactcgacggaagtggcagggaccgggcattacctgcgagtgccgggcgcctcctgctccgctgtgcgcgcttggggtgggactcggcgggggaggggtcgtgtacattgtcccaccaggcgcaatgtagccgggcggcgcagaggatttcttttttggtcttgagagcatagagtcccttttcatattcacgtgtactcttaagaaagcgtctgttctccaaactggctttccattctccccgtcctaaatggtgcgtggctgacaccgtagtgttttcaaaactggatatggccaggatgctatagcattgtcagtgcatctccttggaaacaatgccatctttgaatgtgagagataaacctagtttcagcatgtctgcagcagagaccagtacatcaggcttattcccacaggaagcctcctaaagcctgtggcgcggcaaccatttccaggactaaataataatgtgtcagatgcctgtgagtggactgcctggccaaatgactcatgaagatattcacggaagaatagtcaaaaaccaaagaaaaggcatattctagaagcaccttcaattccatcgaggatttttgagcagctgaagaagaaagttctgaaaatatgagtgacaggactccagcacattttttttagttgtttcttacattatctttgttaacccatccgcttttgtgtataatattaagttattttccactactgcaatggctagtaatttacttaggctcagagttttactctgtatggacagagaaataggaggtaacaacagtgggagaacaaataggaacagttcactgggatgttggtccccagaaattggctttcattgaataattcctaaagggtgtcgtgtgctgaattgctttttcatagtgatgtgctgcttcttgttcatactcttatgactttaatttcacctttatctactcccagcctctgtatatgcctacgtttttaaaaataatttttggcactgaagatctgattaccatattttttcagtttaaaaattaaatcctcgcaaatagacctttggtatagttgcattctaccctaggttattttctaggatcaagaatagaacaatttctgttctttccagcattactctttactattcatatgttcttgttcagtgttttgttgttctcatattctaggtggaaatgaagggtaatctctatgttctattttcagttttctaggaaaccagaaaaacatgggtagtagaaatgtatagaaaatgtatgaggtctcttaaccattgtgttaaacttgcattaagcttcttttttagcaatatcgatgtcagtgttacctcttctttcctttttatttattttttttgagacagagtctcattctgtcgcccagactggttggagtgcgatgatgcgatcgcggctaactgcaaccgctgcctcccgggtacaagtgattctcgtgccttgggctcccgagtagctgggatttttagtggagaacaggtttcaccatattggccaggctggtcttgaactcgcaacctcaggtgatccacccacctcagcctccccaargtgttgggattacaggcatgagccaccatacctggccccttttgttgttttgaggggcaggcagtaagaagcagggatttcttcaaatgctagtaagcacaaagagagagagggagaagtttttgtaagtaacgaacagggccgggcatggtggcgtgagaggccgaggtgggcagatcacgaggtcaggagttcgagaccagcctgaccaacatggtgaaacccccgtctccactagaaatgcaaagattagccgggcatggtggtgcacgcctgtaatccagctagtcgggaggctgaggcaggagaatcgcttgaacctgggaggtggaggttgcagggagctgagatcacgccactgcactccagcctgggcgacagagtaagactcccgtctcaaaaaaaaaaaaaaaaaaaaaagaacagttgatcattaaggccattaatgtgcatggacagtttgttgcccaggttggagtgtgatgacgacgcaatctcggtaaatataaacctactctgtaacctccacctcctgggctcargcrgttctcgtgcttcagcctcccgagtagctgggatcacaggcatgcgccactaagcccagctaatttttgtatttttagtrgagacggggtttcaccatgttggccaggctggtcttgaactcctggcctcaagtgatgcgcctgcctgggcctcccaaagtgctgggattacaggtgtgagccactgcgcctggcccaataggcacatttttttaataagtagtttgttgattagaacgaagagcacttgccgtaagtgcatgtcattgttttcagctgttatggctaagtcagttaacctcatcaacaattttttcttctgtaaattgaggacaatttttgcttttatgaatgaagtcttaaccagcaggaagaaatataaacaaaggaacatatttttaatttaatgaagcaaaattccatacatcattttgaaaatagtgtttctttccctgataggcctgttctgcatcattcttttagcttccttctgccctgtttatcacttggtcccacttttatatttttcctcttcggtccagaatttcttatttagtttcttgtattttgcctactccctcccttctccatgattcagcctgggcgacagagtgaaactccctctcaaataaa

SEQ ID NO: 375 - DNA, 2720 bp, Homo sapien
agccggagagacgcagcggcggccccagtgccgcccccgggcgcgtgagtggagccgggctcctttcccctaccgcgccgcgacccccgcccgggctgcgcgcgccgcctcccgcgagcccccggcccgactcccgggctcccgcgggtgggggccagggctggtcggcgccggcggggctcgcggcggcggcgggttgcgtcccccgcgcctgctggcccacgtggacctggccgtcgcttgccgtgcggcgcctttgcgaaaactcgacggaagtggcagggaccgggcattacctgcgagtgccgggcgcctcctgctccgctgtgcgcgcttggggtgggactcggcgggggaggggtcgtgtacattgtcccaccaggcgcaatgtagccgggcggcgcagaggatttcttttttggtcttgagagcatagagtcccttttcatattcacgtgtactcttaagaaagcgtctgttctccaaactggctttccattctccccgtcctaaatggtgcgtggctgacaccgtagtgttttcaaaactggatatggccaggatgctatagcattgtcagtgcatctccttggaaacaatgccatctttgaatgtgagagataaacctagtttcagcatgtctgcagcagagaccagtacatcaggcttattcccacaggaagcctcctaaagcctgtggcgcggcaaccatttccaggactaaataataatgtgtcagatgcctgtgagtggactgcctggccaaatgactcatgaagatattcacggaagaatagtcaaaaaccaaagaaaaggcatattctagaagcaccttcaattccatcgaggatttttgagcagctgaagaagaaagttctgaaaatatgagtgacaggactccagcacattttttttagttgtttcttacattatctttgttaacccatccgcttttgtgtataatattaagttattttccactactgcaatggctagtaatttacttaggctcagagttttactctgtatggacagagaaataggaggtaacaacagtgggagaacaaataggaacagttcactgggatgttggtccccagaaattggctttcattgaataattcctaaagggtgtcgtgtgctgaattgctttttcatagtgatgtgctgcttcttgttcatactcttatgactttaatttcacctttatctactcccagcctctgtatatgcctacgtttttaaaaataatttttggcactgaagatctgattaccatattttttcagtttaaaaattaaatcctcgcaaatagacctttggtatagttgcattctaccctaggttattttctaggatcaagaatagaacaatttctgttctttccagcattactctttactattcatatgttcttgttcagtgttttgttgttctcatattctaggtggaaatgaagggtaatctctatgttctattttcagttttctaggaaaccagaaaaacatgggtagtagaaatgtatagaaaatgtatgaggtctcttaaccattgtgttaaacttgcattaagcttcttttttagcaatatcgatgtcagtgttacctcttctttcctttttatttattttttttgagacagagtctcattctgtcgcccagactggttggagtgcgatgatgcgatcgcggctaactgcaaccgctgcctcccgggtacaagtgattctcgtgccttgggctcccgagtagctgggatttttagtggagaacaggtttcaccatattggccaggctggtcttgaactcgcaacctcaggtgatccacccacctcagcctccccaargtgttgggattacaggcatgagccaccatacctggccccttttgttgttttgaggggcaggcagtaagaagcagggatttcttcaaatgctagtaagcacaaagagagagagggagaagtttttgtaagtaacgaacagggccgggcatggtggcgtgagaggccgaggtgggcagatcacgaggtcaggagttcgagaccagcctgaccaacatggtgaaacccccgtctccactagaaatgcaaagattagccgggcatggtggtgcacgcctgtaatccagctagtcgggaggctgaggcaggagaatcgcttgaacctgggaggtggaggttgcagggagctgagatcacgccactgcactccagcctgggcgacagagtaagactcccgtctcaaaaaaaaaaaaaaaaaaaaaaaaaaaaaaaaaaaaaaaaaaaaaaaaaaaaaagcacaaaaaaaaaaaaaaaaaaagaaaaaaaaaaaaaaaaaaaagacaagggggcggcgcgcgcgccgcgacaaatgatcctccgccacgggggaggacaactcatcggcagcccccacccaatattctttagaaaaaggggcgccgccacgaaaaagaggaggatggcattatatcaaaacagcagcgaggcggaccgcggcagcgcccgcaacacaacaggatgcaggtggcgcggggcgggacacataggctgctgctcggaggcgaatcctctgagtgggcgggagggcccctttttcttgtgggggggggggacgtaacatctactgtgggcacgcttcatcatccccatagaaatgtaattatacgcctgcagttgagtgtggattatcaacaacttgcttgtgttgctagtttgc

SEQ ID NO: 376 - DNA, 1145 bp, Homo sapien
agccggagagacgcagcggcggccccagtgccgcccccgggcgcgtgagtggagccgggctcctttcccctaccgcgccgcgacccccgcccgggctgcgcgcgccgcctcccgcgagcccccggcccgactcccgggctcccgcgggtgggggccagggctggtcggcgccggcggggctcgcggcggcggcgggttgcgtcccccgcgcctgctggcccacgtggacctggccgtcgcttgccgtgcggcgcctttgcgaaaactcgacggaagtggcagggaccgggcattacctgcgagtgccgggcgcctcctgctccgctgtgcgcgcttggggtgggactcggcgggggaggggtcgtgtacattgtcccaccaggcgcaatgtagccgggcggcgcagaggatttcttttttggtcttgagagcatagagtcccttttcatattcacgtgtactcttaagaaagcgtctgttctccaaactggctttccattctccccgtcctaaatggtgcgtggctgacaccgtagtgttttcaaaactggatatggccaggatgctatagcattgtcagtgcatctccttggaaacaatgccatctttgaatgtgagagataaacctagtttcagcatgtctgcagcagagaccagtacatcaggcttattcccacaggaagcctcctaaagcctgtggcgcggcaaccatttccaggactaaataataatgtgtcagatgcctgtgagtggactgcctggccaaatgactcatgaagatattcacggaagaatagtcaaaaaccaaagaaaaggcatattctagaagcaccttcaattccatcgaggatttttgagcagctgaagaagaaagttctgaaaatatgagtgacaggactccagcacattttttttagttgtttcttacattatctttgttaacccatccgcttttgtgtataatattaagttattttccactactgcaatggctagtaatttacttaggctcagagttttactctgtatggacagagaaattggcgtgaccccggggggaaccattcgggaccgttccggggatgtggcccctggcgcctggcccaaggggggggcgcggtcagaggcagggcggctcacccccc

SEQ ID NO: 377 - DNA, 996 bp, Homo sapien
agccggagagacgcagcggcggccccagtgccgcccccgggcgcgtgagtggagccgggctcctttcccctaccgcgccgcgacccccgcccgggctgcgcgcgccgcctcccgcgagcccccggcccgactcccgggctcccgcgggtgggggccagggctggtcggcgccggcggggctcgcggcggcggcgggttgcgtcccccgcgcctgctggcccacgtggacctggccgtcgcttgccgtgcggcgcctttgcgaaaactcgacggaagtggcagggaccgggcattacctgcgagtgccgggcgcctcctgctccgctgtgcgcgcttggggtgggactcggcgggggaggggtcgtgtacattgtcccaccaggcgcaatgtagccgggcggcgcagaggatttcttttttggtcttgagagcatagagtcccttttcatattcacgtgtactcttaagaaagcgtctgttctccaaactggctttccattctccccgtcctaaatggtgcgtggctgacaccgtagtgttttcaaaactggatatggccaggatgctatagcattgtcagtgtaagtcccttttgggtatttttatttaattgtgtagtgacttgacagaagtgtttcccagcttgacctaagtaatgaatttgcataggatttcagcatcagtatggaagtgatcagatgtcagtggctggtgccaccttgcagataaatggccactggtccacgtagttcgtctttactatacattttgattaagttctctaggaccagctgactggtaattataagtcacatgaaaccctgcagagatgagagcttacattgaacacttcttaacaagttttctattctttgtttcatctgttacaattaaactcaccttcgtctagggtaagaccattactttacgcaataacatactagcttaatttacggtatttatatgtatttatatatattgtatatacataatcat

SEQ ID NO: 378 - DNA, 303 bp, Homo sapien
gttttttgagaaactaaacactgtcaggaaaagctcagtttctcaaaaaacataatagggaaccatgaaagacaaaaccagtacctgagcttttcctgacagtgtttagtttttcttggctatttactatgctattaatagtaacagtttccattatggagcctcagtaggttcttgacatacattaacccattgctattatgtaattttctaataaaatgatgtgataaaacatattttctgtaatatactcatagaatatgtgattataagtaaataaatagatgttggggtagtcctcca

SEQ ID NO: 379 - DNA, 1181 bp, Homo sapien
accccaggccccatgctgggaagaggtcagaacctcccaagggacccagaaggccagaacacactagagggtcccggcatcctgatgagtccactgtccccgcgatggttttcagggatggagaaggctccctgtcctccgctggaaccctgcagccgggctgacgagaccccagcgagacctgcagaacattacagcagaatgaaggagagccagaggaagaggcagatgtgctggcctgtaaacagtctgatttccaatgtaaaccagattcaggcccacgacatcaggtcagcatctcccactgtgggaatcctatgtggccccatcgtctggacagtgtgggtcaggtcactgtggctgttttgtgatgcgtgtgtgggctcatccctcagtgctcagaagctgcagacactatggaaccgcttttcaggccccgtggccgtcacccccgctctagagacttgattgcagggaccatgcccggccggcctaactgcacccctcactccagtctcttctcacgtgcacgacctcacagcgctgtcacaaggcctgctgggcacacgcagctcatagagaagtgatggcttcctccttgccccctcacactccctccttccacctctccaccctcacttcggagcacagcaggctgattgtggagacatctcccagccaggatgtgtcaacagggaatgtgctggggacagcgggagttcacagccacccccgcagcgccttcctggagcacgtccacaggccatgtgcagctgcatcccccacgacggcagggacaagttccttccatagggcccgggtggcccccagagctgcaccatttatgatccggtcctttgcagaacgcaagggacagacacatgaaccctgacctaggttcttgtgcagaaatgttctctcatcggaatagaaaggtatgagtctcaggactggttctctgcaaagcagccatcggcctttcaagcagaaaccatggagcccccagaggctgagtcttccaaggcgctgggagacttggcgtttgcctcttttttaaatgcaatgaccgttgcagtgcatggaatcagagacatgtatctatgcgtagaaatgagtctgtaaacacgatcaaggtgtgatttctgtatgacaatgcagttggatcagaaattggagagtgc

SEQ ID NO: 380 - DNA, 1180 bp, Homo sapien
gcagcccccaggcccctgctgggaagaggtcagaacctcccaaggacccagaaggccagaacacactagagggtcccggcatcctgatgagtccactgtccccgcgatggttttcagggatggagaaggctccctgtcctccgctggaaccctgcagccgggctgacgagaccccagcgagacctgcagaacattacagcagaatgaaggagagccagaggaagaggcagatgtgctggcctgtaaacagtctgatttccaatgtaaaccagattcaggcccacgacatcaggtcagcatctcccactgtgggaatcctatgtggccccatcgtctggacagtgtgggtcaggtcactgtggctgttttgtgatgcgtgtgtgggctcatccctcagtgctcagaagctgcagacactatggaaccgcttttcaggccccgtggccgtcacccccgctctagagacttgattgcagggaccatgcccggccggcctaactgcacccctcactccagtctcttctcacgtgcacgacctcacagcgctgtcacaaggcctgctgggcacacgcagctcatagagaagtgatggcttcctccttgccccctcacctccctccttcccctctccccctcacttcggagcacacaggctgattgtggagacatctcccagccaggatgtgtcaacagggaatgtgctggggacagcgggagttcacagccacccccgcaggcgccttcctggagcacgtccacaggccatgtgcagctgcatcccccacgacggcagggacaagttccttccatagggcccgggtggcccccagagctgcaccatttatgatccggtcctttgcagaacgcaagggacagacacatgaaccctgacctaggttcttgtgcagaaatgttctctcatcggaatagaaaggtatgagtctcaggactggttctctgcaaagcagccatcggcctttcaagcagaaaccatggagcccccagaggctgagtcttccaaggcgctgggagacttggcgtttgcctcttttttaaatgcaatgaccgttgcagtgcatggaatcagagacatgtatctatgcgtagaaatgagtctgtaaacacgatcaaggtgtgatttctgtatgacaatgcagttggatcagaaattggagagtgc

SEQ ID NO: 381 - DNA, 394 bp, Homo sapien
caatgccctttatattgcaataaactctttatataataaaatataaatatattgcagtttctcctaattcacagcttatgtaaaacatgtattaaggcaacagactatttgttccttttgaagaaaattaattacatctttgtgtgtgagagattcctacatgttaacaaaaatatagtgagtcaaattcacaatttggttaaaattaggccttgaaatcaggctcttccctttagctatatgacacatttgtactttacatggcttcagatggccactacacttgacaagtcatctgtcaaaagtcaaaacggtctctaacaatgatagctaggataaagctgtgaacatttgtgaaattctactgctggagtgtctctattttcctgtcccc

SEQ ID NO: 382 - DNA, 391 bp, Homo sapien
caatgccctttatattgcaataaactctttatataataaaatataaatatattgcagtttctcctaattcacagcttatgtaaracatgtattaaggcacagactatttgttccttttgaagaaaattaattacatctttgtgtgtgagagattcctacatgttaacaaaaatatagtgagtcaaattcacaatttggttaaaattaggccttgaaatcaggctcttccctttagctatatgacacatttgtactttacatggcttcagatggccactacacttgacaagtcatctgtcaaagtcaaacggtctctaacaatgatagctaggataaagctgtgaacatttgtgaaattctactgctggagtgtctctattttcctgtcccc

SEQ ID NO: 383 - DNA, 711 bp, Homo sapien
ccaaggaagagaagaagacacgatgagggaatcttccagcggctttccaagtcccgcagaagtgccagtcctcgccacaagcctgcccatccaccggtgggggaggccagcagcccaccctccctgccactgtcaagtgccctgggcatcctctccacaccttctttctccacaaagtgcctgctgcagatggacagtgaagatccactggtggacagtgcacctgtcacttgtgactctgagatgctcactccggatttttgtcccactgccccaggaagtggtcgtgagccagccctcatgccaagacttgacactgattgtagtgtatcaagaaacttgccgtcttccttcctacagcagacatgtgggaatgtaccttactgtgcttcttcaaaacatagaccgtcacatcacagacggaccatgtctgatggaaatccgaccccaactggtgcaactattatctcagccactggagcctctgcactgccactctgcccctcacctgctcctcacagtcatctgccaagggaggtctcacccaagaagcacagcactgtccacatcgtgcctcagcgtcgccctgcctccctgagaagccgctcagatctgcctcaggcttacccacagacagcagtgtctcagctggcacagactgcctgtgtagtgggtcgcccaggaccacatcccacccaattcctcgctgct

SEQ ID NO: 384 - DNA, 5677 bp, Homo sapien
atggctttgcggggcgccgcgggagcgaccgacaccccggtgtcctcggccgggggagcccccggcggctcagcgtcctcgtcgtccacctcctcgggcggctcggcctcggcgggcgcggggctgtgggccgcgctctatgactacgaggctcgcggcgaggacgagctgagcctgcggcgcggccagctggtggaggtgctgtcgcaggacgccgccgtgtcgggcgacgagggctggtgggcaggccaggtgcagcggcgcctcggcatcttccccgccaactacgtggctccctgccgcccggccgccagccccgcgccgccgccctcgcggcccagctccccggtacacgtcgccttcgagcggctggagctgaaggagctcatcggcgctgggggcttcgggcaggtgtaccgcgccacctggcagggccaggaggtggccgtgaaggcggcgcgccaggacccggagcaggacgcggcggcggctgccgagagcgtgcggcgcgaggctcggctcttcgccatgctgcggcaccccaacatcatcgagctgcgcggcgtgtgcctgcagcagccgcacctctgcctggtgctggagttcgcccgcggcggagcgctcaaccgagcgctggccgctgccaacgccgccccggacccgcgcgcgcccggcccccgccgcgcgcgccgcatccctccgcacgtgctggtcaactgggccgtgcagatagcgcggggcatgctctacctgcatgaggaggccttcgtgcccatcctgcaccgggacctcaagtccagcaacattttgctacttgagaagatagaacatgatgacatctgcaataaaactttgaagattacagattttgggttggcgagggaatggcacaggaccaccaaaatgagcacagcaggcacctatgcctggatggcccccgaagtgatcaagtcttccttgttttctaagggaagcgacatctggagctatggagtgctgctgtgggaactgctcaccggagaagtcccctatcggggcattgatggcctcgccgtggcttatggggtagcagtcaataaactcactttgcccattccatccacctgccctgagccgtttgccaagctcatgaaagaatgctggcaacaagaccctcatattcgtccatcgtttgccttaattctcgaacagttgactgctattgaaggggcagtgatgactgagatgcctcaagaatcttttcattccatgcaagatgactggaaactagaaattcaacaaatgtttgatgagttgagaacaaaggaaaaggagctgcgatcccgggaagaggagctgactcgggcggctctgcagcagaagtctcaggaggagctgctaaagcggcgtgagcagcagctggcagagcgcgagatcgacgtgctggagcgggaacttaacattctgatattccagctaaaccaggagaagcccaaggtaaagaagaggaagggcaagtttaagagaagtcgtttaaagctcaaagatggacatcgaatcagtttaccttcagatttccagcacaagataaccgtgcaggcctctcccaacttggacaaacggcggagcctgaacagcagcagttccagtcccccgagcagccccacaatgatgccccgactccgagccatacagttgacttcagatgaaagcaataaaacttggggaaggaacacagtctttcgacaagaagaatttgaggatgtaaaaaggaattttaagaaaaaaggttgtacctggggaccaaattccattcaaatgaaagatagaacagattgcaaagaaaggataagacctctctccgatggcaacagtccttggtcaactatcttaataaaaaatcagaaaaccatgcccttggcttcattgtttgtggaccagccagggtcctgtgaagagccaaaactttcccctgatggattagaacacagaaaaccaaaacaaataaaattgcctagtcaggcctacattgatctacctcttgggaaagatgctcagagagagaatcctgcagaagctgaaagctgggaggaggcagcctctgcgaatgctgccacagtctccattgagatgactcctacgaatagtctgagtagatccccccagagaaagaaaacggagtcagctctgtatgggtgcaccatccttctggcatcggtggctctgggactggacctcagagatcttcataaagcacaggctgctgaagaaccgttgcccaaggaagagaagaagaaacgatgagggaatcttccagcggctttccaagtcccgcagaagtgccagtcctcgccacaagcctgcccatccaccggtgggggaggccagcagcccaccctccctgccactgtcaagtgccctgggcatcctctccacaccttctttctccacaaagtgcctgctgcagatggacagtgaagatccactggtggacagtgcacctgtcacttgtgactctgagatgctcactccggatttttgtcccactgccccaggaagtggtcgtgagccagccctcatgccaagacttgacactgattgtagtgtatcaagaaacttgccgtcttccttcctacagcagacatgtgggaatgtaccttactgtgcttcttcaaaacatagaccgtcacatcacagacggaccatgtctgatggaaatccgaccccaactggtgcaactattatctcagccactggagcctctgcactgccactctgcccctcacctgctcctcacagtcatctgccaagggaggtctcacccaagaagcacagcactgtccacatcgtgcctcagcgtcgccctgcctccctgagaagccgctcagatctgcctcaggcttacccacagacagcagtgtctcagctggcacagactgcctgtgtagtgggtcgcccaggaccacatcccacccaattcctcgctgccaaggagagaactaaatcccatgtgccttcattactggatgctgacgtggaacggtcagagcagggactacactgtgccactgtgcagaatgaggagcaaaaccagccggccatctatatatgaactggagaaagaattcctgtcttaaactaagtgccttactgttgtttaagcatttttttaaggtgaacaaatgaacacaatgtatctacctttgaactgtttcatgctgctgtgttttcaaaagctgtggccatgttcctaaattagtaagatatatccagcttctcaaaaaatgtatatgattgctgttagccatgtctattgtttttcctctggattcttttcttataacttggaatacacaaaagtataaaacaagagatgtgcaccaatgaaaactatgctgggtcgaattaccttcagcacaatgttaatgttttcgttctcatttatgcctttgtccatttgcacacaacagaaattgtaatgagcttcactattttggtttcttgccgccggggggtcgggggtccggtcgggccggtgtcttgtcttgtttcttgtttttttctcttgtagtttcttgttcttaattgtcatttttgcaacaaaaagccaagaaagagctttagtttcttggcaagaataatgtgatattagtaagtaaaggtcttaaaagtctgacgactggaatagatataaagtcctgtttaaactacctaaccttggctgtgggccgataatgcatatgtccagttctcacttaaattatgcaatgatatttctctctgaggaaattatacggaatgtaacttataaaagctttactgaatataagttataagcattttattcattagaactccaaaatagatgttcaaagttcagtccttgccatttgactgagaccacatggtgtgccccttgagtgaggctaatctttaggtttttcctatagaaaacgttcttcctccatcagtagccctttatttgatattcagaagtggaaagctttttcattctccagtagaacttttaaaaattgttacagatacctagctcttcacagatatcatgtattgtaaacagtcatgtgtcttaattttattttctctatttgagtgcataattatcctaataatcccaaagacactgacaactcaaggaacagcagtacagtactattagaagttaagtatgttgttgttatttcacatttcatttaattgtggataaatgttagacatctgttgaaataagctcatatggtggaaacgacaactatattatgaattattttcagaaatggatctttgaatagcagatcaggatttaaataataaaattatctatgaatcacttttatggtcatacatatatgatacaaatccagagttattggtgcagaaatggctacccgagagcttggtaaatttgccttggtttcttatgttaaatgtattgtgcttcccttctgtctctagaatgtggctcttcagaagacagacaatcgacatttaaatttttccaaacaatgaaaaactaaattaaaaacattgcttgatatttcatttaaaattgcaccttgcttaaggtttactgaataactgaaatgtcagcaatttaaaataaattcaattgtgtgataaaatatctcacctataatagaagaaaaggaaaatcatattatttggcaattttgcagcattgtggttgcctaacaggtatatccagcagatgagaaacagtatgaaaggattgtattaacatggtaagttttgccctaaggaaaacgatcttgcattctggattcttgcagcaaagtctcagatacttaatacgttttcttgttttatcatctgttctatgattcggcttcactttgtgtggttattgaattatgtaacagagatttggttttcccaaaatgttatcacatttgaaactatgattgctttgtgttcagtccttttggaacacgtagcttccagcttaagggtagagaaatatatacctaaaatcatcaatacatgaaagaaaaaggatggaaactatgtcctcagttttacttctaccaaaacatccctgtatgtgtgtgcatgtatgttggcgtgtgtgtgtgtgcatgcatattagtaaatgtgtgtttgcatgtgtgtgttggggagtgtatgtgatctgggtgtttgtttatctctgttattattcccctttagctttattttagtcaactctacattatgatgaatttcaaaatgaagctgtattaaaataattgtaatataacaattcaatctcacatgttactgcagatagttaacttttgctgcaatctattgtacatttgcaattttctgtgttagtaaacttagcagaatctggttatttatttttgtgtaggcttaatgttcactgaaagataagtcaattactgttagtaaaaaattaaggtactctcactgcagagatttaaggcctgggcctaatgtgctgtattatgaagccttgtgactgaaaaatatgtttacatatgttgtctatttttttaataaacttttatagctggtctatttgctcagtagctttgatcctctcttgattattgtgactatagtttgcaatggtttattttgtattcaataagaaaaattgtgttaataaagattattgtttaataagccaggtattaacctgctaaatatatta

SEQ ID NO: 385 - DNA, 1026 bp, Homo sapien
atttttgagctaccatgtagtagtgtctatttttactttgtgttttatttttgtgcattgttccttgaaatacagcatttatgttaccctgtaagcctttggatttacaattaaagaatatataatgctttttttttggcttcgaagtttccagctgcatcttttttgatgaagtaaaaagcatagtgtacgtgccctatctccctttcttgtccacagattgcttaaggtaggaggcatcagacttggaattaatggagctgcgatcccgggaagaggagctgactcgggcggctctgcagcagaagtctcaggaggagctgctaaagcggcgtgagcagcagctggcagagcgcgagatcgacgtgctggagcgggaacttaacattctgatattccagctaaaccaggagaagcccaaggtaaagaagaggaagggcaagtttaagagaagtcgtttaaagctcaaagatggacatcgaatcagtttaccttcagatttccagcacaagataaccgtgcaggcctctcccaacttggacaaacggcggagcctgaacagcagcagttccagtcccccgagcagccccacaatgatgccccgactccgagccatacagtgtgagctttctgcactgccacgggggctcctgtgttgacttctctcctttcacttgacttggattcaaattgagcagatgtgttttcatagcaggttgtagatgagtgtaggacatttcgtaggtgccacaactatttgagaaacaaaacttgagcataggttccttagtctaattttcttctactcacaaaaaatgaattttagatgctatgcagttggtgatgcgacctggccccggagtagaaagtgaaacaccacatctcgagacattctgttaaacacttgcacgcaacgttagcataacctaattctatcatcagccatttgtgtcagggtactttgaaaaatgaaatcaggaattcaggattacttctgtttctttctttgtttcgtgaggggaaaaa

SEQ ID NO: 386 - DNA, 778 bp, Homo sapien
tgtgtgactatatccaacatataagctctgattcattatttgtgtgactatatccaacatataagctcagaatcattatttattgacctgaaccccgagaagtaagaaaccaaaataagaaatcgatcctgcaatattctttgcagttagggtctgaccatttttgtttttattgctgtgtgctaaatacatggctatgaagataaaggaaaaccatgaaataccagttctccctttttgcctccaacagatttccagcacaagataaccgtgcaggcctctcccaacttggacaaacggcggagcctgaacagcagcagttccagtcccccgagcagccccacaatgatgccccgactccgagccatacagtgtgagctttctgcactgccacgggggctcctgtgttgacttctctcctttcacttgacttggattcaaattgagcagatgtgttttcatagcaggttgtagatgagtgtaggacatttcgtaggtgccacaactatttgagaaacaaaacttgagcataggttccttagtctaattttcttctactcacaaaaaatgaattttagatgctatgcagttggtgatgcgacctggccccggagtagaaagtgaaacaccacatctcgagacattctgttaaacacttgcacgcaacgttagcataacctaattctatcatcagccatttgtgtcagggtactttgaaaaatgaaatcaggaattcaggattacttctgtttctttctttgtttcgtgaggggaaaaa

SEQ ID NO: 387 - DNA, 539 bp, Homo sapien
gtcttggtttctggttatcttgtctgttgccttttctttacctctttagatgatttccagtgaagtttactgtcttttttttttaattaactaattatttttgcctttgccagcaaccgcactgttgatcttacctcacctacccaactttctccaaactcacctcaagcaacagttcttcaagcctatcatgctgcattgactttctatttgttgaagaagctaagctgttttaatgcatcagggatttttttccctctacctagaatattctctttctagttcttccagtggttggctgcttccgtcattcaggtcttgggtcagatgttgcttttcagggactctttgttacaaccatttctaaagtttgtctcccacccttatcccactgtaacctgttaacctctttctgtcttatctataacacagtactttctaaagtaatccagttggcttttgggatcagagctcttacatgacctattttctgctctgtccctaggagaacactgacaactattgccaataagacacca

SEQ ID NO: 388 - DNA, 539 bp, Homo sapien; identical to SEQ ID NO: 387

SEQ ID NO: 389 - DNA, 276 bp, Homo sapien
gcccgactccacattgacctctttcctgcttccttcccagtttagtgtcctgttccatctgtgacagctgacatgctttagtgagctttggaagcattccccggagagctaggaggagcaaccacaaatgcgaccattgtccccagtgcagaggcctacacctgagctttcttttctggtggttggcctttgaagccagttggctttggaagttccctttggagtcaacttcctgatgtctggaacccttcttaggatcatttgttcctttttcaa

SEQ ID NO: 390 - DNA, 276 bp, Homo sapien; identical to SEQ ID NO: 389

SEQ ID NO: 391 - DNA, 303 bp, Homo sapien
ggatggtgcaatgagctcagtgggcagacggtttggttatttcaatgaataatttgaatgtcaacaagttggtggatgctgatgaaaggggaagtagtaaatagcaaaggtctcaatgcctgactctgagatggagtaaggatgagctatcaggactggcacttcacttctaaatgttgagcactcaggttttgctaaatttataaaagcacatgaactaactaacatcgcatatttccttaacgagaaaaccagtttatctctgtttaaaacagttctgatctactcaaatacacattttta

SEQ ID NO: 392 - DNA, 994 bp, Homo sapien
gggggagatttgaactcagatttgtgcaattctaaagccagcctgtttattatagtctcccaggagacaacaacagaaacaatgagaaaacaatttgaaagagatgcaaacccaccccttgaatcttacccaggactatggagctccattaattgctgtcaacacgctggaacctatttcacatgaagctcagaccaattacaattaatgccacagtcatgactacaaactagaaaccaatgccagaggaagcttaagttaaagaaagcaacgatcacgcacatatattatgttagcaattaggcttaatcctagaatcgtgaagccaaagagaatatattaaagagagaacagtgccctcctgggaagaagagcaatttcaaatagactttttagtggctttctacattacttacttgaatatattatgctcccctagaaattactatattacaattactcacgccacattttatttattctcagcaaggaaatgggatggtgcaatgagctcagtgggcagacggtttggttatttcaatgaataatttgaatgtcaacaagttggtggatgctgatgaaaggggaagtagtaaatagcaaaggtctcaatgcctgactctgagatggagtaaggatgagctatcaggactggcacttcacttctaaatgttgagcactcaggttttgctaaatttataaaagcacatgaactaactaacatcgcatatttccttaacgagaaaaccagtttatctctgtttaaaacagttctgatctactcaattcaccttttaatttcctgaatgtttattatccaatttcattacacacgggcggcaagggagctatctcacaccgaaatacaaaggtagggaataaccatttctcgccgacaattagcaggccaaagaaagtcctccccgggagcgagggtggaacagatgcccagtgataggaccccccaaggggcccgctgtccgggtggtcccca

SEQ ID NO: 393 - DNA, 802 bp, Homo sapien
ggggagagatttgaactcagatttgtgcaattctaaagccagcctgtttattatagtctcccaggagactacaacagaaacaatgagaaaacaatttgaaagagatgcaaaacccaccccttgaatcttacccaggactatggagctccattaattgctgtcaacacgctggaacctatttcacatgaagctcagaccaattacaattaatgccacagtcatgactacaaactagaaaccaatgccagaggaagcttaagttaaagaaagcaacgatcacgcacatatattatgttagcaattaggcttaatcctagaatcgtgaagccaaagagaatatattaaagagagaacagtgccctcctgggaagaagagcaatttcaaatagactttttagtggctttctacattacttacttgaatatattatgctcccctagaattactatattacaattactcacgccacattttatttatttcagcaaggaaatgggatggtgcaatgagctcagtgggcagacggtttggttatttcaatgaataatttgaatgtcaacaagttggtggatgctgatgaaaggggaagtagtaaatagcaaaggtctcaatgcctgactctgagatggagtaaggatgagctatcaggactggcacttcacttctaaatgttgagcactcaggttttgctaaatttataaaagcacatgaactaactaacatcgcatatttccttaacgagaaaaccagtttatctctgtttaaaacagttctgatctactcaaatacacattttaattt

SEQ ID NO: 394 - DNA, 790 bp, Homo sapien
  misc_feature (454)..(454): n=a,c,g or t
catggaacaataattttaagaacattaattgttgacatcttggctgccatcacaccaacagaaatactaccatcactctaagccaactctctcttttacctttggtttacatgggcataccatatctggctacagagaaattctccaggagtctgcagtacactttcacattgtccagcaatgctaacattcaatcttagaggtcatttagcagctcatgactgagttgattttgtgcagtaaggcatagatctataatgaaaaacaaatcttcatttacttctgttgccccatttaatgattatgaagagtaaactcttataaagtaaagtaatactctacttgaaaggaatattcctgttacactataaaatatattaccagatattaatttgatggtagaacaaaggaaggatctgtataaaatatatcaagtaaggttttacatgtcatntatacacaactggcagagtttttgagaggctctaatgaaagggtacttctcatgctttggaagctcaagtcttcctcctcaaagagagtcaatgacagttattttacagaggattttgtagaaatgaaaggtaattaatgccatataaaagccaaaacattacatctgtaattgctacatagcatgtgcatgacaagttgctggtgcccataagggacagcacttgaaggtccaaggaaagagcatacccttccacctctcagtttgatttgagtattaaatgagctagcacacagcttggcacatgttaggctttcagtatttaccttctttctt

SEQ ID NO: 395 - DNA, 790 bp, Homo sapien
catggaacaataattttaagaacattaattgttgacatcttggctgccatcacaccaacagaaatactaccatcactctaagccaactctctcttttacctttggtttacatgggcataccatatctggctacagagaaattctccaggagtctgcagtacactttcacattgtccagcaatgctaacattcaatcttagaggtcatttagcagctcatgactgagttgattttgtgcagtaaggcatagatctataatgaaaaacaaatcttcatttacttctgttgccccatttaatgattatgaagagtaaactcttataaagtaaagtaatactctacttgaaaggaatattcctgttacactataaaatatattaccagatattaatttgatggtagaacaaaggaaggatctgctataaaatatatcaagtaaggttttacatgtcattatacacaactgcagagttttttgagaggctctaatgaaagggtacttctcatgctttggaagctcaagtcttcctcctcaaagagagtcaatgacagttattttacagaggattttgtagaaatgaaaggtaattaatgccatataaaagccaaaacattacatctgtaattgctacatagcatgtgcatgacaagttgctggtgcccataagggacagcacttgaaggtcaaaggaaagagcatacccttccacctctcagtttgatttgagtattaaatgagctagcacacagcttggcacatgttaggctttcagtatttaccttctttctt

SEQ ID NO: 396 - DNA, 690 bp, Homo sapien
ggcagtaggaaattcaaatactgagttggtgtgattacacagaacatctgtttgaattttaaagggaagcaggattttacttttggcttttcttccgtagtttgccttgtgagattaaaattgctgatgtttaaggaaagcagctgttgtggaaagacttagtgggtttttatcagagagtaaattttgaaacaatttgtgggtttttgaagtaaggttacagtatatagtgattagacagcattttcactctctcatgaaaactgtgtagtcaaaacaaaagtaggaaaaacacatgcataaccccttaaatcttatttatgaaaagataactagcgaagatgggaaaatcagacttgtgtttaagtatcatttttttataaactagctaagtgcattttgaaacaaaattcatgaggtctttgtggaatgccttttccatttttttgttttgttttgttttgtttttgcactcacattatgtctcagcaatttaatggagggctgatttcctaatgctttgatccttggtgagtgtggttcaccccaactagggaggaattcagtcttttgttcttgattccatgctcattgatctcctccactgccattctcagaaacaatggcagtattttgtttccatagtaatgaaactgtttgctctaataggattctatagtggtagtgcgg

SEQ ID NO: 397 - DNA, 690 bp, Homo sapien
ggcagtaggaaattcaaatactgagttggtgtgattacacagaacatctgtttgaattttaaagggaagcaggattttacttttggcttttcttccgtagtttgccttgtgagattaaaattgctgatgtttaaggaaagcagctgttgtggaaagacttagtgggtttttatcagagagtaaattttgaaacaatttgtgggtttttgaagtaaggttacagtatatagtgattagacagcattttcactctctcatgaaaactgtgtagtcaaaacaaaagtaggaaaaacacatgcataaccccttaaatcttatttatgaaaagataactagcgaagatgggaaaatcagacttgtgtttaagtatcatttttttataaactagctaagtgcattttgaaacaaaattcatgaggtctttgtggaatgccttttccatttttttgttttgttttgttttgtttttgcactcacattatgtctcagcaatttaatggagggctgatttcctaatgctttgatccttggtgagtgtggttcaccccaactagggaggaattcagtcttttgttcttgattccatgctcattgatctcctccactgccattctcagaaacaatggcagtattttgtttccatagtaatgaaactgtttgctctaataggattctatagtggtaattttt

SEQ ID NO: 398 - DNA, 879 bp, Homo sapien
gcctctgggagggaggagccgagaagcagaggacagaagctcccgggcgggggttaggaggaaccgagaggactcaggctcccagccttggggctgatggagaagaggcaattgtcctgcacgcgcatctggtggagctcagtggaattcaactctgcttgctctgcccagagctccacgtcaatccgctggtcacttggaaggaggaaggccctgggagaggggtgcaaagccatacaaagaaactggtcaggcagaacagagaggcaggggctctgagaccctgatgggcaggtggaggcttcttccatgactcccgcacttcatgcacccatttggcaaactgtcccatgtgtgcctgagcaaatgtggctgttgtggattctcgtttcataatggccccaaaacccaggaacagactctgggccacggcgactcaagaagtgaagagtggggctcccactgtggatgccaggagtcaaggtgttgcttgaatatgggggccactttgagctggccatgaacccttctgtgacaaagctcttgggaaagggccatttgggacacctaggaaggctggcagcaccaaccagcagccccagggagtggggtgtccaggccaacttgggcacagggtggagaacagatgccccagcagggctggcactcttgaaacagaagcaaggctgtgcacagagttaatgcccctgacatgcctaggactgcggtaaagtagataatgcaccttaagtagccgacaaaactagtgacaaagggtcctgaggtcacaatctgaaaggagaacccatttcactctcggagatggcacagaactggttccagctgcaaaccgggtggaggatacgatagggagcatcc

SEQ ID NO: 399 - DNA, 879 bp, Homo sapien; identical to SEQ ID NO: 398

SEQ ID NO: 400 - DNA, 577 bp, Homo sapien
agcttgtaggggagggtggtgagaaggaggcagccacccagtgggcggggatctttcctggtgactgagaattactgccccttcaccccagggcctaatttccccagtcccccacccactatccatcctaagactgcagttgctggccattaccagggatctggcctctcatccaggtccctcctccgctgctccgctgccacagggcggggtctcccagtgccgggcaggcctgcaggtgcggggctgcatggggaggggggcactcagcagctgctgtacgaggcaggccccctccccctcctgctcaaagctggagcctgcttcctgtcgtccctgtcagcaccctgggtgggggagggaccaggtagtgggggaagtggaaaagggattgagcggttggagtgcagcagctgagaaacagcagaagagaaatggagaaggatgacgacaagagaccaagagcataggctgaaggaccagaggggtgtgagaacacaggggagatcccaggggctgcagaggctgcagaccctagactgtgagagcgagaccagaggcagagatgaccagagag

SEQ ID NO: 401 - DNA, 574 bp, Homo sapien
agccttgaggggagggtggtgagaaggaggcagccacccagtgggcggggatctttcctggtgactgagaattactgccccttcaccccagggcctaatttccccagtcccccacccactatccatcctaagactgcagttgctggccattaccagggatctggcctctcatccaggtccctcctccgctgctccgctgccacagggcggggtctcccagtgccgggcaggcctgcaggtgcggggctgcatggggaggggggcactcagcagctgctgtacgaggcaggccccctccccctcctgctcaaagctggagcctgcttcctgtcgtccctgtcagcaccctgggtgggggagggaccaggtagtgggggaagtggaaaagggattgagcggttggagtgcagcagctgagaaacagcagaagagaaatggagaaggatgagaaagagaccaagagcataggctgaaggaaagaggggtgtgagaacacaggggagatcccaggggctgcagaggctgcagaccctagactgtgagagcgagaccagaggcagagatgaccagagag

SEQ ID NO: 402 - DNA, 3053 bp, Homo sapien
agcggggctggggctccgctggggaaccggccgagcggcgcgcgcggaggtgtccggcggccaggaggatggccaaggtcccgaagctggaagacaccttcctgcaggcgcagcctgcgccccaactgtccccggggatccaggaagactgctgtgtgcagctcctgggcaagggcttgctagtctatccggaagaaacagtgtacctggcggccgaagggcagcccgggggcgagcagggcggcggggagaaaggcgaagacccggagctgccgggggcagtgaaatcacgaaatgcacttaaacaatggtaacttttcctctgaagaagaggacgccgacaaccacgacagcaaaaccaaagcagcggatcaatacctgtctcagaagaaaaccatcacgcagattgtgaaggataaaaagaagcagacacagctcacgctgcagtggcttgaagagaattacattgtatgtgaaggagtttgcttaccacggtgcattctttatgcacactacttagatttctgtaggaaagagaaattagagccagcctgtgcggccacctttggaaagacaattcgccagaagtttcccctcctaacaacaaggcggcttggaacaagaggccattcaaaacaaatgacatgcacagatgacctgtttggtcatctcttaaggtatcattactatgggattggcatcaaagagagcagtgcatattaccactccgtttattctggaaagggcttgacaagggtggcttcactcgtaaatattcgcttagctcaaaaactggaacacttcttccagaattccccagcgctcaacaccttgtataccaaggatgcatttctaaggacaagcttattagcagacataagaaattttgctaaaaattgggaacagtgggttgtttcatccttggaaaacttgccagaagctctaactgacaagaaaatacctattgtgcgaagatttgtatcttctctgaaacgacaaacatctttcttacatcttgcccagattgccagaccagctctctttgaccagcatgtcgttaattctatggtgtctgatattgaaagggttgatttgaacagcattggctctcaagcccttcttaccatttcaggcagcacagacactgaatctggtatctacactgaacgttcttttcatttgattcgaatgcttctcgatgaatacattctcctggccatggagacccagtttaataatgacaaagagcaggagttacagaatttattggacaagtatatgaagaattcagatgcgagtaaagctgctttcactgcttctccgagttcatgctttctggccaaccgtaataaagggagcatggtttccagcgacgctgtgaagaatgaaagccacgtggagacaacctatctccctctgccatccagtcaacctggaggcctaggccctgctctgcaccagttccctgctgggaacacagacaacatgccgctcacaggtcaaatggagctttcacagattgctggtcatctgatgacaccacccatttctccagccatggcaagccgaggaagtgtcattaaccaaggaccaatggcagggaggcccccaagtgtgggcccagtactgtcagctccatcacactgctccacatacccagagcccatttatcccactctccctcaagccaatcatgacttttatagcaccagctctaactaccagactgtgtttagggcacagccccactccacatcaggactctatcctcatcacaccgagcatggtcgatgcatggcttggactgaacagcagctttcaagagacttcttcagtggcagctgtgcggggtctccatataactcccggccaccgtctagctatggcccatccctgcaagcccaggattcacacaatatgcagtttttaaatacaggaagcttcaatttcttgagcaacacaggagctgccagctgccaaggagcaacactgcctcctaattcaccaaatggatactatggaagcaacataaactacccagagtctcacaggctcggatcaatggtgaatcagcacgtttctgtcatcagcagcattcgttcactgcccccctacagtgacatccacgatccacttaacattttagatgacagtggtagaaaacagaccagctcgttttacacagacacatcatctccagttgcatgtcgaactccagtcctagcttccagtttgcaaaccccaattccttcttcctcatcccaatgtatgtatggaacttccaaccagtatccagctcaagaaaccctggactcccatggaacaagcagtagagaaatggtgtcctctttaccacctatcaacactgtgttcatgggaacagcagctggaggcacttaaaccaccaatgtgggagggggtgctaaaactttaaaaaaaatctctactgtgcaaatatcattattcactcagacttccataagagtaaataaaaatgaatatgcagtggctgacattgttttaaagtcactggtactatggacaactccatagtgaatggagatacttgcagagcttgtcatgcacactaagagtttaaaatgtgagctcattattaatcatagtttcaaaattatcaaataaaaccagtgaagatctgaagatgcaaacatttcaactatgaagatttacatttcactttctaatttattaaacatctgtgtgcctttttatctttggtttcttttaaaaagtatatttaatgcctttacaatacctttaatttattaggatctcagaatcattgtttactatcccttatttgacaaaaagtcaaatgtgtatgttctacctccaacggaaatgtttacaaggtcaagacttaattcaattcagacaagaccaaagttgcttgacttcaattcctgtgcattagtgtgatgatttctgtcacatagcagcattccgattctatgtaactgaatggagatgataagtgctttcccctctttatttaaaaaagattaaaaggaatcaaagaaataatgtatggc

SEQ ID NO: 403 - DNA, 619 bp, Homo sapien
  misc_feature (70)..(167): n=a,c,g or t
tgaggcagaaacatttgagttgaaagctgagtgatgagaaggaggcaaagatgtgaagatctgagggagnnnnnnnnnnnnnnnnnnnnnnnnnnnnnnnnnnnnnnnnnnnnnnnnnnnnnnnnnnnnnnnnnnnnnnnnnnnnnnnnnnnnnnnnnnnnnnnnnntgtgaatgaaggagagagtagagcaaaataaataaaaaatcaggggcccatctacatagggtaagatgcttggttcatgttccaagggtatcggaagccactatggcatttgagacgagtgaaagtttgatctactcttcagcaatatcattctggttgctctcgggaaggtgagtgggtgaaacaaaggtggagatcatgggaccagtcaggaggctgctgtgttggtccaggagagaaaagatggtggtttgaactacaaccgtgaaagtgcagatggaaagaggaggttgatgggggatatatttcggcggtagcacttaagtgaaatggagttttctttgtgaaatatgtagaggaaataatttctgggagactagcaagtgggaccaaatggagaaaaaatgattgtctggtagaccatacagactcaaatttagactaggtatgtg

SEQ ID NO: 404 - DNA, 918 bp, Homo sapien
atgaatgaaatggagaggcaagaaactggaaatagcaagacgaggtatcatgctactgcaatagtccaggcaaaacatgataaaggcctcaacaagaatggcaccagtggagatgaagagcagaagatcaaggtgggagacagagacagagaaaacaaaggatttgatggcttattagatgtttggaatactttaaactttattcatccttgctttgctgtgtgcaactgtgtgcatggggtgtgcaacagtggactagatggcgatggaacctgtgagtgctactctgcgtacactggccccaagtgtgacaagcctgggacagccatgaaagcctccagtccaaatgcaaaggcaagtgggtaggacaggccttctgtggtcctcagtcagcctccttccttggccactcctgccattgtgcagtggactcctgggcagaggccttctcagtaaggcaggagacccagtccagaagccagcctaagggaaaaccctaatagatatgcttccaagtaaaaaaataataataattctgtccagccaaatgacaagagactaggacaaaaatatttaaaattcacatggcagatacatttttataacaaaaaattggattcatgtaaagtccaaaatctaaatttcagaataagaaatgaaaacaggcgtgagccacctcgcccagcggcatcaggctttcttaaagtgagagcacgcctgtactagagcaagcaggaatcagagaccttccagaaatactactgtgtaagggccagaaatatcttcacttgtcattgttatataatcattattacttttgctgtaatgttaatattgatttattaatatatattatcttttcatacattttctaagaaacatttatattgataagatcttttattttgccaagggctt

SEQ ID NO: 405 - DNA, 3085 bp, Homo sapien
gcttgccatatgtagaaagctgaaactggatcccttccttacaccttatacaaaaattaattcaagatggattaaagacttaaatgttagacctaaaaccataaaaaactctagaagaaaacctaagcaataccattcagaccataggggtgggcaaggacttcatgactaaaacaccaaaagcaatggcaacaaaagccaaaattgacaaatgggatctaattaaactaaagagcttctgcacagcaaaagaaactaccataagagtgaacaggcaacttacagaatgggagaaaatttttgcaatctgcccatctgacaaagggctaatatccagaatctacaaagaagttaaacaaatttacaagaaaaagtcaaacaaccccatcaaaaagtgggcaaaggatatgaacagacacttctcacaagaagacatttatgcagccaacagacagatgaaaaaatgctcatcatcactggtcatcagagaaatgcaaatgaaaaccacaatgagctggagcctgagtccgctgcatggagactctggtgtgggtcttgacgaggtggtcagtgaattcctgatcgggagacttggtaaatacagtctccttccagaggtcgggggtcaggtagctgtagaaatggcatcaaagccccatgggaaaaatggttttctcaccggaacagctttaggacttggtgccctgcatctcatgctccagctccagctctggctaaaaggggccaaggtacatctcaggccattgcttcagagggtgcaagccctaagtcttgatggcttccatgtggtgttgggcctgcaggcctttgcgttggctacagctttgctgggctgtatgtgtttttgcagtcctggactgcctgaggaaagcgcttcttttggtagagatcagaagctcaagagaccaagccaattcatgcaggcacatctaaaacttctgcaaggatgtggagaagctttctggggcactaggatgatgatacaaagaggaaaaccaaactggggggaaaaaaaagctgccatcaatttgggggaaagtggaagatgttccctgagaagtgcttgctctcaagggattgatagtcaaatggtggacaagacatgtaaacagataagtacgatgatggatttaattaaatacccaaggtgcacagcattattaaagatacggaggtcaaatgtgtgtgggaggttgtggaaatgcttcatagaggagcagccatccaagctgtcctcccctgaatacctgcagttctccaaatcacctcctccttttcaccttcacacatgtagttcttccagtctcctctatcttcatgtgactaactacctctactgccactctctgctccagagatctctagatggtaaggaggtaattggagttggggaccggagggaggggacatctcaaccatcaaagcaaaaggagacaggtctccttcaggcaaaatttaagttagggttaagagcctgccaaccaagcacaggtaataagcaatggcagaggaaagttacttgctcagagatgacaccagaagcagggagcagaaccaaggccccagataaaatccctgacctcagattgctctctggttccctgaaccagacactgctacagattaaggaactgtttctaagcaggtgtggcctgaggatcagtcaacacgatttcctgtttgatgctgagaaagaacatgagaaggctcaggactgcaagcagcaggatgatggttcaatttccagctctgggcccctccaccctccacgtctgtcactcttgccctctaatcagaaccgggttctggatggggccagctgggaaagtgggaaatgtgtcgacgtcatcgttgttgttgttgttaaatttaaactctatagcttttccagaactgagaatgcaaaagtgaattatcccctccacctctgaggtctttgcttttacctttttctgtaagtacccttgatagttatgacaggtaagcaggctaggaggcttcattaggagcccccaattcacgtgtctccagctgaaatgcaacagcagttggaccaagaggtaagaaattcctattgcaaagaggagtgagaatcaagagacctgggttctaattaaataactataagataagagtggggggtgtagctaaggctggggttcctttccttactgtatttttaccagatataacatctggctgtcacttcaccattttttgactctgtttactcatttagaataaaaatagttaacatttactgggcataccatatgtgccaagcactgagttactttatatacattagctcatttaattctcaaaaccttagtaagtagacatagtatctctatgtaacagatgtatttccggaggcaccataaggttaatttgccacatggtccacagcagaggtgctcaggtctgaaccagggcatgtgcttttaaccctgtgctaaactgaaaaccctaagaatatctagctcttggggtttcaagggtgaaatgcatccacatttttcacatgtatccccatacacagtagcactggacaagagataacaattattgcagtaatttcttggcttgtgtttctccggaactataggaaagcactatctaatccattttgctgccattgtatgggttggggaagcaatgctgttgctcattgtataatgaggccacagcacatgactgcttcaagaaaacctgggaggtcaggaagcattgtaattaaaatatcaacataacacaaggaaaggggcaagccacaatgaagctctcaatagcacatttttttctaagaaatgctgacatcccttaaggagaaagggattggccttggcaagcagcaagcgaagagctgctgatctgaagctctgcttggggaaggaaggatgggaggagacacatgaactctaaagaagctactttagcattttcctttgcccatcctggggccaggtcagaaaaccagaaccattcccaactaaaagactctcaacgttccagtgagcccactgctgcagagtgcaattccaggcattatgcacaccatttg

SEQ ID NO: 406 - DNA, 708 bp, Homo sapien
  misc_feature (366)..(468): n=a,c,g or t
cacactcacttccattcttgagcaggcccttaggctaatctggttgttttttttccttcaattcgtttccaccaatcagcccagagatgacataatctaccttttattttgcctgttgccaattgggaagacacttgactgtctccagattggtgacaccttttccatttgctaatttcccagattaccaacagtggctctgcagttataacttcaattactttcggtaccctgggaaataaattatatctcagcctggagaaatggagtaatctaaaatagtgggatttgaagtctaaaaatttgagtttgagtattggttctgccccttggtagctgtataatatttagcctattatttaattnnnnnnnnnnnnnnnnnnnnnnnnnnnnnnnnnnnnnnnnnnnnnnnnnnnnnnnnnnnnnnnnnnnnnnnnnnnnnnnnnnnnnnnnnnnnnnnnnnnnnnnccaattggaaaaagctgtattttcagaaggtcatctttttacatatatggcagactagcctaaagttcaaagccttctccaaatctggtcctgctttacctgataagctctctcaaaacttctgttcttctcactaactctaagcaaaacaggcacattcctaccccatatactggcttctgcttttcttgtttcctgaatgcccttctattttttttatgtttttatttttattttttt

SEQ ID NO: 407 - DNA, 6087 bp, Homo sapien
tggctcacgcctggaatgccagcactttgggaggccaaggcaggcggatcacctgaggccaggaggtctagaccagcctggccgacatggagaaaccctgtctggtagtggggatacggggattagcaagacgtggtgggtgcgtgcctgtgatcccagctacttgggaggctgaggcacgagaattgcttgagcctgggaggcggaggttgcagtgagccgagattgcaccacgtgcaatgcagcctgggtgacaaagtgagactccatctcaaaaaaaaaaagttgatattgccaaatagggtgaagatcaagggagtacaaatggcatagaattacaagaatgcttattgtagaaacttaatgtttattttaaatccatgagttttggtaaatattgataaactttctgagcagttatcatttcttgatgtggttggattgtaggaaaaatgtggagggatgattctgggctgcaaaggccaaggatgcttgtatctttgaaatgtttcacaaccatttatataagggttacccgtgattttctcattggattcttaacaactctgaggtgtatattcattcatccctgtttatagatgacagcactgagaatctggagttaagtgacttgcttacggtcacacagctacacagcctttcagtgatacagtcagaatttaaactagttcttttttttccgagatgggggactcactctgtcacccaggctacagtgcaggattatagctcactgcagccttgaactcctgggctcaagtgatcctcctgcctcagcctcctgagtggctgggactacagatgaagacaagcacctgtggtgcccctcactgcaagaagtcagggaggcattccacagcctgggtgcccacagtcctgccctgtaccctctggggcccttttggcacggtggcagcgcttccagatttcctttcagaaagatgcagtccttccgcagctgggccatgcagatctcctggcatccaacttgttggaaacagtggccctctgctcaatgatgagactggggaggggaaacaggaggacatttcaaggaaaggatggagcgtggatatgaatgggaagcgggtggtgggggagctcatcagcatcctcagaggggctcatgcccacgctgcaacacagaatgggacttgccagatgtttgtagtcgactctgagtgccccgtgctgagaaacctgaaagcacacccacctatggctgcgcgtgttgcacgctcaaggctgagttcacatagttctgtagcctcctcctacaccaagtcaggtcggccctgtgtgaccagtagaagagatgggatgtcactttcgagggtgcttccaggcgaggctggcctgaatgagaatgaggagcaggacgctccccaagagattgccttggacatcagcctgggccacatctacaagttcagacccattcagcagctaaattccaggagcatcacggagaatctccggcgagctcagcaccatggcaggcactgtgctggctgtgggccggatgctacagaaactgtgttatcggacacgggtcctgatctaggccccaagagagagttcttgtacaagaaagaattggggccaggcatgtttctggcgctgtgtgcccaggcccagccgggggcctacactgatgagaacctcatgggactgattgagctgctgtgccgcaccagcctggacgtggggctccgcctgctgcccaaagttgacctccagcagcttctcctcttgctcctggagaacatccgggagtggccagggaaggcgcttccttccaggacagatgtcccacggcttgcagatggctgggcccaggagacggtgctagcccttcctctgagagaaggggtgcaggctgccgccaccgtgcccatcctcctgtacaacctggaggatggcttgtcagaccatcccctggaccagggccccgctgccctgcccggcggccctgcagccctgcctcggctccagctctcacatcgccaaagaagcccaagatacaggcacctggggaaaccgttgacggtttttgctgttccagttttggctgcttctcaagatcacgaagcccagggcactctgcaagggtttctgcaagttcagcagttcatcgctggagggcgcttccttccaggacagatgtcccacggcttgcagatggctgggccccaggagacggtgctagcccttcctctgagagaaggggtgcaggctgccgccaccgcgcccatcctcctgtacaacctggaggatggcttgtcagaccatcccctggaccaggggccccgctgccctgcccggcggccctgcagccctgcctcggctccagctcccacatcgccaaagaagcccaagatgcaggcacctggggaaacgtttcccactgactggagccccccgcccgtggaattcctcaacccgagggtgctgcaggccagtcgggaggccccggcccagaggtgggtgggtgtggtgggcccccagggcctgaggagactggctggtgagctgcccgaggagttggagcaggaacacctggacttggacccgaagaggggcctggccttgccagagaagctgttctggaacacgtcaggcctgagccagcaggctgcggccccagagttttcctgggggggctcaggaagctacttcaacaacctggactacttactgcaggagaagagggaacaggccctggagcaggagcgagagaggctgcttctgcaggagtgtctcaatctcaactccttggatcttgatgaagaggaagtgccactcacacccgagcacagaaagaggcaagagagctctctggggccctttcataagggtaccaatcctattcatgaaggctccaccctcatgcctcatcacctcccaaaggccccacttcctaataccttcaccctggggctttccttccggagacaagcagtaaataagatcagtgaagttgtgctgcaagggctcctgagaaaggctaacgctgggggcataaggagtgctgggaaaggtgtgggctctgatgatgtgggctctaatcatgtgggctttgatgatgaaggctctgatgatgaagggatgctggtggaaaagtactcagtgtccctgcagaccatcccgccggtccatccaggtgagactgtgtttctgcccaggtgtcaccccctgccatgcatcctggactcctcactcctgaagccacgcagccacctggaagggctgttcctcaggcagtatgctgagcattgggacctcaaggatgaggaagatgcagtctctgccctagaggagcttacagcagcaggaagtttctgtcataggacagacccagggctcaccaagactcaagcagatgatgaagcctggggctcactggcccaatcagcgtattcagactggctggctgcttatgaggctcttgggccagggctgcctgctcagtgggcagctgactctagctgctgcaaaatgcctttcactcaaaggtttttgcttttgccaatcccctccctcacatgccttgaaacaagcactttcaaagacaaagacataaacaacaaaagggtgcaggctgagttgccaacttacagtgtcattgggccgattcaggttcttgactgctgcacaaaagaatttgagagcaagtacaaagcaaaagtaggtaaagaagtttattgcaaagcgaagatctcctgggaggcccccgtggagaagaagactgagtgtatccagaaagggaagaacaaccaggtgggtgcttggacgctgctcctggtgctgccttcaccccaggacgtctcctcccattctggccctcgcgctctcactaaccggacacctttctgcccccagaccgagtgcttcaacttcatccgcttcctgcagccctacaatgcctcccacctgtacgtctgtggcacctacgccttccagcccaagtgcacctacgtcaacatgctcaccttcactttggagcatggagagtttgaagatgggaagggcaagtgtccctatgacccagctaagggccatgctggccttcttgtggatggtgagctgtactcggccacactcaacaacttcctgggcacggaacccattatcctgcgtaacatggggccccaccactccatgaagacagagtacctggccttttggctcaacgaacctcactttgtaggctctgcctatgtacctgagagtgtgggcagcttcacgggggacgacgacaaggtctacttcttcttcagggagcgggcagtggagtccgactgctatgccgagcaggtggtggctcgtgtggcccgtgtctgcaagggcgatatggggggcgcacggaccctgcagaggaagtggaccacgttcctgaaggcgcggctggcatgctctgccccgaactggcagctctacttcaaccagctgcaggcgatgcacaccctgcaggacacctcctggcacaacaccaccttctttggggtttttcaagcacagtggggtgacatgtacctgtcggccatctgtgagtaccagttggaagagatccagcgggtgtttgagggcccctataaggagtaccatgaggaagcccagaagtgggaccgctacactgaccctgtacccagccctcggcctggctcgtgcattaacaactggcatcggcgccacggctacaccagctccctggagctacccgacaacatcctcaacttcgtcaagaagcacccgctgatggaggagcaggtggggcctcggtggagccgccccctgctcgtgaagaagggcaccaacttcacccacctggtggccgaccgggttacaggacttgatggagccacctatacagtgctgttcattggcacaggagacggctggctgctcaaggctgtgagcctggggccctgggttcacctgattgaggagctgcagctgtttgaccaggagcccatgagaagcctggtgctatctcagagcaaggtaaagctgctctttgccggctcccgctctcagctggtgcagctgcccgtggccgactgcatgaagtatcgctcctgtgcagactgtgtcctcgcccgggacccctattgcgcctggagcgtcaacaccagccgctgtgtggccgtgggtggccactctggatctctactgatccagcatgtgatgacctcggacacttcaggcatctgcaacctccgtggcagtaagaaagtcaggcccactcccaaaaacatcacggtggtggcgggcacagacctggtgctgccctgccacctctcctccaacttggcccatgcccgctggacctttgggggccgggacctgcctgcggaacagcccgggtccttcctctacgatgcccggctccaggccctggttgtgatggctgcccagccccgccatgccggggcctaccactgcttttcagaggagcagggggcgcggctggctgctgaaggctaccttgtggctgtcgtggcaggcccgtcggtgaccttggaggcccgggcccccctggaaaacctggggctggtgtggctggcggtggtggccctgggggctgtgtgcctggtgctgctgctgctggtgctgtcattgcgccggcggctgcgggaagagctggagaaaggggccaaggctactgagaggaccttggtgtaccccctggagctgcccaaggagcccaccagtccccccttccggccctgtcctgaaccagatgagaaactttgggatcctgtcggttactactattcagatggctcccttaagatagtacctgggcatgcccggtgccagcccggtggggggcccccttcgccacctccaggcatcccaggccagcctctgccttctccaactcggcttcacctggggggtgggcggaactcaaatgccaatggttacgtgcgcttacaactaggaggggaggaccggggagggctcgggcaccccctgcctgagctcgcggatgaactgagacgcaaactgcagcaacgccagccactgcccgactccaaccccgaggagtcatcagtatga

SEQ ID NO: 408 - DNA, 79 bp, Homo sapien
gaaaccaaaataaatctacattgtaacgtgattagctcagtgcttggcacatgggcactgagtaaatgatagatatttt

SEQ ID NO: 409 - DNA, 416 bp, Homo sapien
  misc_feature (310)..(340): n=a,c,g or t
tccagcactgtgaagaaaatctatttcagttgcttaagtgcccagttcatggtattctgcaacagcagcctggcagactaatacaccagcattctcttcactagtgttcaagagttcaacaagtagaggagcatcacctctgtccacatcagtttggagtatctgtcctcactccagaatactcatgttagaattgtagatccccagtgactagaggtggggacctggtataaggctgtgtcggatcatgagcgcggagtccctcacggctcagagctgtctttgatgatacggtggagttcccacgagnnnnnnnnnnnnnnnnnnnnnnnnnnnnnnntggcctctctctcgcctgctcctgtctctcactatgttgactcgcctgctccctcttcacctgctgccgatgagta

SEQ ID NO: 410 - protein, 76 aa, Homo sapien
MSKFQQNNFSCKKSTTGQDAVQENPRCVESNISWSSFSVPHSISYSLTTVPVISTSHSRHEGWFPCKHFGDCAPGR

SEQ ID NO: 411 - protein, 75 aa, Homo sapien [sequence omitted]

SEQ ID NO: 412 - protein, 854 aa, Homo sapien
MAEAEEQETGSLEESTDESEEEESEEEPKLKYERLSNGVTEILQKDAASCMTVHDKFLALGTHYGKVYLLDVQGNITQKFDVSPVKINQISLDESGEHMGVCSEDGKVQVFGLYSGEEFHETFDCPIKIIAVHPHFVRSSCKQFVTGGKKLLLFERSWMNRWKSAVLHEGEGNIRSVKWRGHLIAWANNMGVKIFDIISKQRITNVPRDDISLRPDMYPCSLCWKDNVTLIIGWGTSVKVCSVKERHASEMRDLPSRYVEIVSQFETEFYISGLAPLCDQLVVLSYVKEISEKTEREYCARPRLDIIQPLSETCEEISSDALTVRGFQENECRDYHLEYSEGESLFYIVSPRDVVVAKERDQDDHIDWLLEKKKYEEALMAAEISQKNIKRHKILDIGLAYINHLVERGDYDIAARKCQKILGKNAALWEYEVYKFKEIGQLKAISPYLPRGDPVLKPLIYEMILHEFLESDYEGFATLIREWPGDLYNNSVIVQAVRDHLKKDSQNKTLLKTLAELYTYDKNYGNALEIYLTLRHKDVFQLIHKHNLFSSIKDKIVLLMDFDSEKAVDMLLDNEDKISIKKVVEELEDRPELQHVYLHKLFKRDHHKGQRYHEKQISLYAEYDRPNLLPFLRDSTHCPLEKALEICQQRNFVEETVYLLSRMGNSRSALKMIMEELHDVDKAIEFAKEQDDGELWEDLILYSIDKPPFITGLLNNIGTHVDPILLIHRIKEGMEIPNLRDSLVKILQDYNLQILLREGCKKILVADSLSLLKKMHRTQMKGVLVDEENICESCLSPILPSDAAKPFSVVVFHCRHMFHKECLPMPSMNSAAQFCNICSAKNRGPGSAILEMKK

SEQ ID NO: 413 - protein, 392 aa, Homo sapien [sequence omitted]

SEQ ID NO: 414 - protein, 802 aa, Homo sapien
MAEAEEQETGSLEESTDESEEEESEEEPKLKYERLSNGVTEILQKDAASCMTVHDKFLALGTHYGKVYLLDVQGNITQKFDVSPVKINQISLDESGEHMGVCSEDGKVQVFGLYSGEEFHETFDCPIKIIAVHPHFVRSSCKQFVTGGKKLLLFERSWMNRWKSAVLHEGEGNIRSVKWRGHLIAWANNMGVKIFDIISKQRITNVPRDDISLRPDMYPCSLCWKDNVTLIIGWGTSVKVCSVKERHASEMRDLPSRYVEIVSQFETEFYISGLAPLCDQLVVLSYVKEISEKTEREYCARPRLDIIQPLSETCEEISSDALTVRGFQENECRDYHLEYSEGESLFYIVSPRDVVVAKERDQDDHIDWLLEKKKYEEALMAAEISQKNIKRHKILDIGLAYINHLVERGDYDIAARKCQKILGKNAALWEYEVYKFKEIGQLKAISPYLPRGDPVLKPLIYEMILHEFLESDYEGFATLIREWPGDLYNNSVIVQAVRDHLKKDSQNKTLLKTLAELYTYDKNYGNALEIYLTLRHKDVFQLIHKHNLFSSIKDKIVLLMDFDSEKAVDMLLDNEDKISIKKVVEELEDRPELQHVYLHKLFKRDHHKGQRYHEKQISLYAEYDRPNLLPFLRDSTHCPLEKALEICQQRNFVEETVYLLSRMGNSRSALKMIMEELHDVDKAIEFAKEQDDGELWEDLILYSIDKPPFITGLLNNIGTHVDPILLIHRIKEGMEIPNLRDSLVKILQDYNLQILLREGCKKILVADSLSLLKKMHRTQMKGVLVDEENICESCLSPILPSE

SEQ ID NO: 415 - protein, 841 aa, Homo sapien
MAEAEEQETGSLEESTDESEEEESEEEPKLKYERLSNGVTEILQKDAASCMTVHDKFLALGTHYGKVYLLDVQGNITQKFDVSPVKINQISLDESGEHMGVCSEDGKVQVFGLYSGEEFHETFDCPIKIIAVHPHFVRSSCKQFVTGGKKLLLFERSWMNRWKSAVLHEGEGNIRSVKWRGHLIAWANNMGVKIFDIISKQRITNVPRDDISLRPDMYPCSLCWKDNVTLIIGWGTSVKVCSVKERHASEMRDLPSRYVEIVSQFETEFYISGLAPLCDQLVVLSYVKEISEKTEREYCARPRLDIIQPLSETCEEISSDALTVRGFQENECRDYHLEYSEGESLFYIVSPRDVVVAKERDQDDHIDWLLEKKKYEEALMAAEISQKNIKRHKILDIGLAYINHLVERGDYDIAARKCQKILGKNAALWEYEVYKFKEIGQLKAISPYLPRGDPVLKPLIYEMILHEFLESDYEGFATLIREWPGDLYNNSVIVQAVRDHLKKDSQNKTLLKTLAELYTYDKNYGNALEIYLTLRHKDVFQLIHKHNLFSSIKDKIVLLMDFDSEKAVDMLLDNEDKISIKKVVEELEDRPELQHVYLHKLFKRDHHKGQRYHEKQISLYAEYDRPNLLPFLRDSTHCPLEKALEICQQRNFVEETVYLLSRMGNSRSALKMIMEELHDVDKAIEFAKEQDDGELWEDLILYSIDKPPFITGLLNNIGTHVDPILLIHRIKEGMEIPNLRDSLVKILQDYNLQILLREGCKKILVADSLSLLKKMHRTQMKGVLVDEENICESCLSPILPSDAAKPFSVVVFHCRHMFHKECLPMPSMVSWQLGTYQLEGN

SEQ ID NO: 416 - protein, 776 aa, Homo sapien
MAEAEEQETGSLEESTDESEEEESEEEPKLKYERLSNGVTEILQKDAASCMTVHDKFLALGTHYGKVYLLDVQGNITQKFDVSPVKINQISLDESGEHMGVCSEDGKVQVFGLYSGEEFHETFDCPIKIIAVHPHFVRSSCKQFVTGGKKLLLFERSWMNRWKSAVLHEGEGNIRSVKWRGHLIAWANNMGVKIFDIISKQRITNVPRDDISLRPDMYPCSLCWKDNVTLIIGWGTSVKVCSVKERHASEMRDLPSRYVEIVSQFETEFYISGLAPLCDQLVVLSYVKEISEKTEREYCARPRLDIIQPLSETCEEISSDALTVRGFQENECRDYHLEYSEGESLFYIVSPRDVVVAKERDQDDHIDWLLEKKKYEEALMAAEISQKNIKRHKILDIGLAYINHLVERGDYDIAARKCQKILGKNAALWEYEVYKFKEIGQLKAISPYLPRGDPVLKPLIYEMILHEFLESDYEGFATLIREWPGDLYNNSVIVQAVRDHLKKDSQNKTLLKTLAELYTYDKNYGNALEIYLTLRHKDVFQLIHKHNLFSSIKDKIVLLMDFDSEKAVDMLLDNEDKISIKKVVEELEDRPELQHVYLHKLFKRDHHKGQRYHEKQISLYAEYDRPNLLPFLRDSTHCPLEKALEICQQRNFVEETVYLLSRMGNSRSALKMIMEELHDVDKAIEFAKEQDDGELWEDLILYSIDKPPFITGLLNNIGTHVDPILLIHRIKEGMEIPNLRDSLVKILQDYNLQQLLFFRMLVTSIELELKHFLKNS

SEQ ID NO: 417 - protein, 415 aa, Homo sapien
MAEAEEQETGSLEESTDESEEEESEEEPKLKYERLSNGVTEILQKDAASCMTVHDKFLALGTHYGKVYLLDVQGNITQKFDVSPVKINQISLDESGEHMGVCSEDGKVQVFGLYSGEEFHETFDCPIKIIAVHPHFVRSSCKQFVTGGKKLLLFERSWMNRWKSAVLHEGEGNIRSVKWRGHLIAWANNMGVKIFDIISKQRITNVPRDDISLRPDMYPCSLCWKDNVTLIIGWGTSVKVCSVKERHASEMRDLPSRYVEIVSQFETEFYISGLAPLCDQLVVLSYVKEISEKTEREYCARPRLDIIQPLSETCEEISSDALTVRGFQENECRDYHLEYSEGESLFYIVSPRDVVVAKERDQDDHIDWLLEKKKYEEALMAAEISQKNIKRHKILDIGLAYINHLDSEVRRGSSI

SEQ ID NO: 418 - protein, 346 aa, Homo sapien
MAEAEEQETGSLEESTDESEEEESEEEPKLKYERLSNGVTEILQKDAASCMTVHDKFLALGTHYGKVYLLDVQGNITQKFDVSPVKINQISLDESGEHMGVCSEDGKVQVFGLYSGEEFHETFDCPIKIIAVHPHFVRSSCKQFVTGGKKLLLFERSWMNRWKSAVLHEGEGNIRSVKWRGHLIAWANNMGVKIFDIISKQRITNVPRDDISLRPDMYPCSLCWKDNVTLIIGWGTSVKVCSVKERHASEMRDLPSRYVEIVSQFETEFYISGLAPLCDQLVVLSYVKEISEKTEREYCARPRLDIIQPLSETCEEISSDCDLQEFPSIRPPVDFRLKHRYAMHAL

SEQ ID NO: 419 - protein, 158 aa, Homo sapien
MAEAEEQETGSLEESTDESEEEESEEEPKLKYERLSNGVTEILQKDAASCMTVHDKFLALGTHYGKVYLLDVQGNITQKFDVSPVKINQISLDESGEHMGVCSEDGKVQVFGLYSGEEFHETFDCPIKIIAVHPHFVRSSCKQFVTGGKKVSAVCLLP

SEQ ID NO: 420 - protein, 779 aa, Homo sapien
MTVHDKFLALGTHYGKVYLLDVQGNITQKFDVVQVFGLYSGEEFHETFDCPIKIIAVHPHFVRSSCKQFVTGGKKLLLFERSWMNRWKSAVLHEGEGNIRSVKWRGHLIAWANNMGVKIFDIISKQRITNVPRDDISLRPDMYPCSLCWKDNVTLIIGWGTSVKVCSVKERHASEMRDLPSRYVEIVSQFETEFYISGLAPLCDQLVVLSYVKEISEKTEREYCARPRLDIIQPLSETCEEISSDALTVRGFQENECRDYHLEYSEGESLFYIVSPRDVVVAKERDQDDHIDWLLEKKKYEEALMAAEISQKNIKRHKILDIGLAYINHLVERGDYDIAARKCQKILGKNAALWEYEVYKFKEIGQLKAISPYLPRGDPVLKPLIYEMILHEFLESDYEGFATLIREWPGDLYNNSVIVQAVRDHLKKDSQNKTLLKTLAELYTYDKNYGNALEIYLTLRHKDVFQLIHKHNLFSSIKDKIVLLMDFDSEKAVDMLLDNEDKISIKKVVEELEDRPELQHVYLHKLFKRDHHKGQRYHEKQISLYAEYDRPNLLPFLRDSTHCPLEKALEICQQRNFVEETVYLLSRMGNSRSALKMIMEELHDVDKAIEFAKEQDDGELWEDLILYSIDKPPFITGLLNNIGTHVDPILLIHRIKEGMEIPNLRDSLVKILQDYNLQILLREGCKKILVADSLSLLKKMHRTQMKGVLVDEENICESCLSPILPSDAAKPFSVVVFHCRHMFHKECLPMPSMNSAAQFCNICSAKNRGPGSAILEMKK

SEQ ID NO: 421 - protein, 873 aa, Homo sapien
MAEAEEQETGSLEESTDESEEEESEEEPKLKYERLSNGVTEILQKDAASCMTVHDKFLALGTHYGKVYLLDVQGNITQKFDVSPVKINQISLDESGEHMGVCSEDGKVQVFGLYSGEEFHETFDCPIKIIAVHPHFVRSSCKQFVTGGKKLLLFERSWMNRWKSAVLHEGEGNIRSVKWRGHLIAWANNMGVKIFDIISKQRITNVPRDDISLRPDMYPCSLCWKDNVTLIIGWGTSVKVCSVKERHASEMRDLPSRYVEIVSQFETEFYISGLAPLCDQLVVLSYVKEISEKTEREYCARPRLDIIQPLSETCEEISSDALTVRGFQENECRDYHLEYSEGESLFYIVSPRDVVVAKERDQDDHIDWLLEKKKYEEALMAAEISQKNIKRHKILDIGLAYINHLVERGDYDIAARKCQKILGKNAALWEYEVYKFKEIGQLKAISPYLPRGDPVLKPLIYEMILHEFLESDYEGFATLIREWPGDLYNNSVIVQAVRDHLKKDSQNKTLLKTLAELYTYDKNYGNALEIYLTLRHKDVFQLIHKHNLFSSIKDKIVLLMDFDSEKAVDMLLDNEDKISIKKVVEELEDRPELQHVYLHKLFKRDHHKGQRYHEKQISLYAEYDRPNLLPFLRDSTHCPLEKALEICQQRNFVEETVYLLSRMGNSRSALKMIMEELHDVDKAIEFAKEQDDGELWEDLILYSIDKPPFITGLLNNIGTHVDPILLIHRIKEGMEIPNLRDSLVKILQDYNLQILLREGCKKILVADSLSLLKKMHRTQMKGVLVDEENICESCLSPILPSDAAKPFSVVVFHCRHMFHKECLPMPSMVGTARIHLYMDFLLPLPPLRRQDQALPFLLLLSLLSMKTTEMKHL

SEQ ID NO: 422 - protein, 826 aa, Homo sapien
MAEAEEQETGSLEESTDESEEEESEEEPKLKYERLSNGVTEILQKDAASCMTVHDKFLALGTHYGKVYLLDVQGNITQKFDVSPVKINQISLDESGEHMGVCSEDGKVQVFGLYSGEEFHETFDCPIKIIAVHPHFVRSSCKQFVTGGKKLLLFERSWMNRWKSAVLHEGEGNIRSVKWRGHLIAWANNMGVKIFDIISKQRITNVPRDDISLRPDMYPCSLCWKDNVTLIIGWGTSVKVCSVKERHASEMRDLPSRYVEIVSQFETEFYISGLAPLCDQLVVLSYVKEISEKTEREYCARPRLDIIQPLSETCEEISSDALTVRGFQENECRDYHLEYSEGESLFYIVSPRDVVVAKERDQDDHIDWLLEKKKYEEALMAAEISQKNIKRHKILDIGLAYINHLVERGDYDIAARKCQKILGKNAALWEYEVYKFKEIGQLKAISPYLPRGDPVLKPLIYEMILHEFLESDYEGFATLIREWPGDLYNNSVIVQAVRDHLKKDSQNKTLLKTLAELYTYDKNYGNALEIYLTLRHKDVFQLIHKHNLFSSIKDKIVLLMDFDSEKAVDMLLDNEDKISIKKVVEELEDRPELQHVYLHKLFKRDHHKGQRYHEKQISLYAEYDRPNLLPFLRDSTHCPLEKALEICQQRNFVEETVYLLSRMGNSRSALKMIMEELHDVDKAIEFAKEQDDGELWEDLILYSIDKPPFITGLLNNIGTHVDPILLIHRIKEGMEIPNLRDSLVKILQDYNLQILLREGCKKILVADSLSLLKKMHRTQMKGVLVDEENICESCLSPILPSDAAENNGTGKSCLLEKKLIPTISLA

SEQ ID NO: 423 - protein, 517 aa, Homo sapien
MAEAEEQETGSLEESTDESEEEESEEEPKLKYERLSNGVTEILQKDAASCMTVHDKFLALGTHYGKVYLLDVQGNITQKFDVSPVKINQISLDESGEHMGVCSEDGKVQVFGLYSGEEFHETFDCPIKIIAVHPHFVRSSCKQFVTGGKKLLLFERSWMNRWKSAVLHEGEGNIRSVKWRGHLIAWANNMGVKIFDIISKQRITNVPRDDISLRPDMYPCSLCWKDNVTLIIGWGTSVKVCSVKERHASEMRDLPSRYVEIVSQFETEFYISGLAPLCDQLVVLSYVKEISEKTEREYCARPRLDIIQPLSETCEEISSDALTVRGFQENECRDYHLEYSEGESLFYIVSPRDVVVAKERDQDDHIDWLLEKKKYEEALMAAEISQKNIKRHKILDIGLAYINHLVERGDYDIAARKCQKILGKNAALWEYEVYKFKEIGQLKAISPYLPRGDPVLKPLIYEMILHEFLESDYEGFATLIREWPGDLYNNSVIVQAVRDHLKKDSQNKTLLKTLAEL

SEQ ID NO: 424 - protein, 269 aa, Homo sapien
MAEAEEQETGSLEESTDESEEEESEEEPKLKYERLSNGVTEILQKDAASCMTVHDKFLALGTHYGKVYLLDVQGNITQKFDVSPVKINQISLDESGEHMGVCSEDGKVQVFGLYSGEEFHETFDCPIKIIAVHPHFVRSSCKQFVTGGKKLLLFERSWMNRWKSAVLHEGEGNIRSVKWRGHLIAWANNMGVKIFDIISKQRITNVPRDDISLRPDMYPCSLCWKDNVTLIIGWGTSVKVCSVKERHASEMRDLPSRYVEIVSADPVVK

SEQ ID NO: 425 - protein, 60 aa, Homo sapien
MKNENKAQRSKKTCLQESASEDQQETENLQNSLLIQKIIQNSTMPQSDQYKFEVLLKTKA

SEQ ID NO: 426 - protein, 96 aa, Homo sapien
MTHYREKHVSQECIQIDTLKKHTGILAWGRGRTLGITCKIISESKIENHLLSHKAKCHSVREMWTEQRRLAGRCSQAPSINHTQCCLHLVPGSQRL

SEQ ID NO: 427 - protein, 56 aa, Homo sapien
FWVAQLLVNGLSCERGPRVDVQQLAPPPPPQQPPQAPQAAGAAATPALLFIFLSLH

SEQ ID NO: 428 - protein, 317 aa, Homo sapien
MAAAAGSCARVAAWGGKLRRGLAVSRQAVRSPGPLAAAVAGAALAGAGAAWHHSRVSVAARDGSFTVSAQKNVEHGIIYIGKPSLRKQRFMQFSSLEHEGEYYMTPRDFLFSVMFEQMERKTSVKKLTKKDIEDTLSGIQTAGCGSTFFRDLGDKGLISYTEYLFLLTILTKPHSGFHVAFKMLDTDGNEMIEKREFFKLQKIISKQDDLMTVKTNETGYQEAIVKEPEINTTLQMRFFGKRGQRKLHYKEFRRFMENLQTEIQEMEFLQFSKGLSFMRKEDFAEWLLFFTNTENKDIYWKNVREKLSAGERSLREL

SEQ ID NO: 429 - protein, 425 aa, Homo sapien
MAAAAGSCARVAAWGGKLRRGLAVSRQAVRSPGPLAAAVAGAALAGAGAAWHHSRVSVAARDGSFTVSAQKNVEHGIIYIGKPSLRKQRFMQFSSLEHEGEYYMTPRDFLFSVMFEQMERKTSVKKLTKKDIEDTLSGIQTAGCGSTFFRDLGDKGLISYTEYLFLLTILTKPHSGFHVAFKMLDTDGNEMIEKREFFKLQKIISKQDDLMTVKTNETGYQEAIVKEPEINTTLQMRFFGKRGQRKLHYKEFRRFMENLQTEIQEMEFLQFSKGLSFMRKEDFAEWLLFFTNTENKDIYWKNVREKLSAGESISLDEFKSFCHFTTHLEDFAIAMQMFSLAHRPVRLAEFKRAVKVATGQELSNNILDTVFKIFDLDGDECLSHEEFLGVLKNRMHRGLWSPTFQGSENWKGWRKEPLRREGGNL

SEQ ID NO: 430 - protein, 327 aa, Homo sapien
MAAAAGSCARVAAWGGKLRRGLAVSRQAVRSPGPLAAAVAGAALAGAGAAWHHSRVSVAARDGSFTVSAQKNVEHGIIYIGKPSLRKQRFMQFSSLEHEGEYYMTPRDFLFSVMFEQMERKTSVKKLTKKDIEDTLSGIQTAGCGSTFFRDLGDKGLISYTEYLFLLTILTKPHSGFHVAFKMLDTDGNEMIEKREFFKLQKIISKQDDLMTVKTNETGYQEAIVKEPEINTTLQMRFFGKRGQRKLHYKEFRRFMENLQTEIQEMEFLQFSKGLSFMRKEDFAEWLLFFTNTENKDIYWKNVREKLSAGEVGIPFYYACDKDEIIS

SEQ ID NO: 431 - protein, 203 aa, Homo sapien
MAAAAGSCARVAAWGGKLRRGLAVSRQAVRSPGPLAAAVAGAALAGAGAAWHHSRVSVAARDGSFTVSAQKNVEHGIIYIGKPSLRKQRFMQFSSLEHEGEYYMTPRDFLFSVMFEQMERKTSVKKLTKKDIEDTLSGIQTAGCGSTFFRDLGDKGLISYTEYLFLLTILTKPHSGFHVAFKMLDTDGNEMIEKREFFKVSGR

SEQ ID NO: 432 - protein, 176 aa, Homo sapien
  MISC_FEATURE (36)..(36): x= any amino acid
  MISC_FEATURE (53)..(53): x= any amino acid
  MISC_FEATURE (58)..(58): x= any amino acid
RTAQQQQKSNKTLVGPCGALKSSSFFTASSLSVNRXRISEDSFVIHNGQLVDXISVGXKPFYDRMSMCWDSPSFQDQIKTDVRAIIQVEVYLVLKYWLPFPGGMIPCSTNSNNGSSSSLTSVNLTFRSSISSKSSGDSFRNIFSFSFTETLAKSFIDPCLSLIYLRHCSCRIRHEG

SEQ ID NO: 433 - protein, 443 aa, Homo sapien
MAAAAGSCARVAAWGGKLRRGLAVSRQAVRSPGPLAAAVAGAALAGAGAAWHHSRVSVAARDGSFTVSAQKNVEHGIIYIGKPSLRKQRFMQFSSLEHEGEYYMTPRDFLFSVMFEQMERKTSVKKLTKKDIEDTLSGIQTAGCGSTFFRDLGDKGLISYTEYLFLLTILTKPHSGFHVAFKMLDTDGNEMIEKREFFKDDTIDSERQLQKIISKQDDLMTVKTNETGYQEAIVKEPEINTTLQMRFFGKRGQRKLHYKEFRRFMENLQTEIQEMEFLQFSKGLSFMRKEDFAEWLLFFTNTENKDIYWKNVREKLSAGESISLDEFKSFCHFTTHLEDFAIAMQMFSLAHRPVRLAEFKRAVKVATGQELSNNILDTVFKIFDLDGDECLSHEEFLGVLKNRMHRGLWVPQHQSIQEYWKCVKKESIKGVKEVWKQAGKGLF

SEQ ID NO: 434 - protein, 382 aa, Homo sapien
MAAAAGSCARVAAWGGKLRRGLAVSRQAVRSPGPLAAAVAGAALAGAGAAWHHSRVSVAARDGSFTVSAQKNVEHGIIYIGKPSLRKQRFMQFSSLEHEGEYYMTPRDFLFSVMFEQMERKTSVKKLTKKDIEDTLSGIQTAGCGSTFFRDLGDKGLISYTEYLFLLTILTKPHSGFHVAFKMLDTDGNEMIEKREFFKLQKIISKQDDLMTVKTNETGYQEAIVKEPEINTTLQMRFFGKRGQRKLHYKEFRRFMENLQTEIQEMEFLQFSKGLSFMRKEDFAEWLLFFTNTENKDIYWKNVREKLSAGESISLDEFKSFCHFTTHLEDFAIAIAKVQLTYMAGRQRGVKERWKGHTGRDLNNNLGNGLKTLFGLEESAKQ

SEQ ID NO: 435 - protein, 53 aa, Homo sapien
MKPPSLLTCHNYQGYLQKKVKAKTSEVEGIIHFCILSSGKAIEFKFNNNNNDD

SEQ ID NO: 436 - protein, 59 aa, Homo sapien [sequence omitted]

SEQ ID NO: 437 - protein, 24 aa, Homo sapien
MFGDQNKVLFCMNSCQGIELKHEK

SEQ ID NO: 438 - protein, 45 aa, Homo sapien
MPANSTPSLHNFSVLLSLHFIYCLELFANLYKLIFPYPSALYTVG

SEQ ID NO: 439 - protein, 112 aa, Homo sapien
MSEASRLCSGYYSLNQSFVEPFQCPRRGEGAALQYCCGFADLKYCCSEPGSYFPYKHSYMWSLRWAESPRVRRLAEPGAREATSGATPGPGRFPRVPAIRPRLGPYGRTRSL

SEQ ID NO: 440 - protein, 15 aa, Homo sapien
MLLKKNYNLTACLRR

SEQ ID NO: 441 - protein, 29 aa, Homo sapien
MKSTSRHAIKKSYDQPEKKYRSSSNEQQL

SEQ ID NO: 442 - protein, 41 aa, Homo sapien
MTNPGSNTYQSGKIRTQNKEKLGPCTISATIKYEYTSELSG

SEQ ID NO: 443 - protein, 28 aa, Homo sapien
MVTEIFQNSTLHNFNVSTHEHKHLMVNL

SEQ ID NO: 444 - protein, 121 aa, Homo sapien
MKIATKKRNSVHVTFRPSTESVQFYNPLENKEAPWKMRLRKLGGFSSGSSNSSTSNTHTSTNSATELVKPGVYRPLDTLGTASVSSKTVKESTEIPTTILQKEGIASSQLGSRSTLRSSSH

SEQ ID NO: 445 - protein, 955 aa, Homo sapien
MFSCLIPGFSAPQSEHGPRTLDNLINPPLNLQETQVTIEEITPLVPPQSGDKGQEDLTSYFLEALLKYIVIQVKSLEWKNKENQERGFSFLFSHFKKYYLPYIFPNICKENSLYHPILDIPQMRPKPHYVVIKKDAETNEAIYCTKEPFIKARVIVIRWLVSFWLEPKPHTGPHIPGMEGEVLPKNIQRAAASLVSREESKNDNADKTDRTTEPEQSHSNTSTLTEREPSSSSLCSIDEEHLTDIEIVRRVFSSKRSNVNFVTEIFRQAFLLPICEAAAMRKVVKVYQEWIQQEEKPLFMQEPEEIVITSSDLPCIENVTDHDISMEEGEKREEENGTNTADHVRNSSWAKNGSYQGALHNASEEATEQNIRAGTQAVLQVFIINSSNIFLLEPANEIKNLLDEHTDMCKRILNIYRYMVVQVSMDKKTWEQMLLVLLRVTESVLKMPSQAFLQFQGKKNMTLAGRLAGPLFQTLIVAWIKANLNVYISRELWDDLLSVLSSLTYWEELATEWSLTMETLTKVLARNLYSLDLSDLPLDKLSEQKQKKHKGKGVGHEFQKVSVDKSFSRGWSRDQPGQAPMRQRSATTTGSPGTEKARSIVRQKTVAMRSRSIGECALPSAYIRSAKSAPVLIHTSKPFLPDIVLTPLSDELSDIDDAQILPRSTRVRHFSQSEETGNEVFGALNEEQPLPRSSSTSDILEPFTVERAKVNKEDMSQKLPPLNSDIGGSSANVPDLMDEFIAERLRSGNASTMTRRGSSPGSLEIPKDLPDILNKQNQMRPIDDPGVPSEWTSPASAGSSDLISSDSHSDSFSAFQYDGRKFDNFGFGTDTGVTSSADVDSGSGHHQSAEEQEVASLTTLHIDSETSSLNQQAFSAEVATITGSESASPVHSPLGSRSQTPSPSTLNIDHMEQKDLQLDEKLHHSVLQTPDDLGNISKLDIYLFSFRASVSGDHK

SEQ ID NO: 446 - protein, 1887 aa, Homo sapien
MFSCLIPGFSAPQSEHGPRTLDNLINPPLNLQETQVTIEEITPLVPPQSGDKGQEDLTSYFLEALLKYIVIQVKSLEWKNKENQERGFSFLFSHFKKYYLPYIFPNICKENSLYHPILDIPQMRPKPHYVVIKKDAETNEAIYCTKEPFIKARVIVIRWLVSFWLEPKPHTGPHIPGMEGEVLPKNIQRAAASLVSREESKNDNADKTDRTTEPEQSHSNTSTLTEREPSSSSLCSIDEEHLTDIEIVRRVFSSKRSNVNFVTEIFRQAFLLPICEAAAMRKVVKVYQEWIQQEEKPLFMQEPEEIVITSSDLPCIENVTDHDISMEEGEKREEENGTNTADHVRNSSWAKNGSYQGALHNASEEATEQNIRAGTQAVLQVFIINSSNIFLLEPANEIKNLLDEHTDMCKRILNIYRYMVVQVSMDKKTWEQMLLVLLRVTESVLKMPSQAFLQFQGKKNMTLAGRLAGPLFQTLIVAWIKANLNVYISRELWDDLLSVLSSLTYWEELATEWSLTMETLTKVLARNLYSLDLSDLPLDKLSEQKQKKHKGKGVGHEFQKVSVDKSFSRGWSRDQPGQAPMRQRSATTTGSPGTEKARSIVRQKTVDIDDAQILPRSTRVRHFSQSEETGNEVFGALNEEQPLPRSSSTSDILEPFTVERAKVNKEDMSQKLPPLNSDIGGSSANVPDLMDEFIAERLRSGNASTMTRRGSSPGSLEIPKDLPDILNKQNQMRPIDDPGVPSEWTSPASAGSSDLISSDSHSDSFSAFQYDGRKFDNFGFGTDTGVTSSADVDSGSGHHQSAEEQEVASLTTLHIDSETSSLNQQAFSAEVATITGSESASPVHSPLGSRSQTPSPSTLNIDHMEQKDLQLDEKLHHSVLQTPDDLEISEFPSECCSVMAGGTLTGWHADVATVMWRRMLGILGDVNSIMDPEIHAQVFDYLCELWQNLAKIRDNLGISTDNLTSPSPPVLIPPLRILTPWLFKATMLTDKYKQGKLHAYKLICNTMKRRQDVSPNRDFLTHFYNIMHCGLLHIDQDIVNTIIKHCSPQFFSLGLPGATMLIMDFIVAAGRVASSAFLNAPRVEAQVLLGSLVCFPNLYCELPSLHPNIPDVAVSQFTDVKELIIKTVLSSARDEPSGPARCVALCSLGIWICEELVHESHHPQIKEALNVICVSLKFTNKTVAHVACNMLHMLVHYVPRLQIYQPDSPLKIIQILIATITHLLPSTEASSYEMDKRLVVSLLLCLLDWIMALPLKTLLQPFHATGAESDKTEKSVLNCIYKVLHGCVYGAQCFSNPRYFPMSLSDLASVDYDPFMHLESLKEPEPLHSPDSERSSKLQPVTEVKTQMQHGLISIAARTVITHLVNHLGHYPMSGGPAMLTSQVCENHDNHYSESTELSPELFESPNIQFFVLNNTTLVSCIQIRSEENMPGGGLSAGLASANSNVRIIVRDLSGKYSWDSAILYGPPPVSGLSEPTSFMLSLSHQEKPEEPPTSNECLEDITVKDGLSLQFKRFRETVPTWDTIRDEEDVLDELLQYLGVTSPECLQRTGISLNIPAPQPVCISEKQENDVINAILKQHTEEKEFVEKHFNDLNMKAVEQDEPIPQKPQSAFYYCRLLLSILGMNSWDKRRSFHLLKKNEKLLRELRNLDSRQCRETHKIAVFYVAEGQEDKHSILTNTGGSQAYEDFVAGLGWEVNLTNHCGFMGGLQKNKSTGLTTPYFATSTVEVIFHVSTRMPSDSDDSLTKKLRHLGNDEVHIVWSEHTRDYRRGIIPTEFGDVLIVIYPMKNHMFSIQIMKKPEVPFFGPLFDGAIVNGKVLPIMVRATAINASRALKSLIPLYQNFYEERARYLQTIVQHHLEPTTFEDFAAQVFSPAPYHHLPSDADH

SEQ ID NO: 447 - protein, 1455 aa, Homo sapien
MLLVLLRVTESVLKMPSQAFLQFQGKKNMTLAGRLAGPLFQTLIVAWIKANLNVYISRELWDDLLSVLSSLTYWEELATEWSLTMETLTKVLARNLYSLDLSDLPLDKLSEQKQKKHKGKGVGHEFQKVSVDKSFSRGWSRDQPGQAPMRQRSATTTGSPGTEKARSIVRQKTVDIDDAQILPRSTRVRHFSQSEETGNEVFGALNEEQPLPRSSSTSDILEPFTVERAKVNKEDMSQKLPPLNSDIGGSSANVPDLMDEFIAERLRSGNASTMTRRGSSPGSLEIPKDLPDILNKQNQMRPIDDPGVPSEWTSPASAGSSDLISSDSHSDSFSAFQYDGRKFDNFGFGTDTGVTSSADVDSGSGHHQSAEEQEVASLTTLHIDSETSSLNQQAFSAEVATITGSESASPVHSPLGSRSQTPSPSTLNIDHMEQKDLQLDEKLHHSVLQTPDDLEISEFPSECCSVMAGGTLTGWHADVATVMWRRMLGILGDVNSIMDPEIHAQVFDYLCELWQNLAKIRDNLGISTDNLTSPSPPVLIPPLRILTPWLFKATMLTDKYKQGKLHAYKLICNTMKRRQDVSPNRDFLTHFYNIMHCGLLHIDQDIVNTIIKHCSPQFFSLGLPGATMLIMDFIVAAGRVASSAFLNAPRVEAQVLLGSLVCFPNLYCELPSLHPNIPDVAVSQFTDVKELIIKTVLSSARDEPSGPARCVALCSLGIWICEELVHESHHPQIKEALNVICVSLKFTNKTVAHVACNMLHMLVHYVPRLQIYQPDSPLKIIQILIATITHLLPSTEASSYEMDKRLVVSLLLCLLDWIMALPLKTLLQPFHATGAESDKTEKSVLNCIYKVLHGCVYGAQCFSNPRYFPMSLSDLASVDYDPFMHLESLKEPEPLHSPDSERSSKLQPVTEVKTQMQHGLISIAARTVITHLVNHLGHYPMSGGPAMLTSQVCENHDNHYSESTELSPELFESPNIQFFVLNNTTLVSCIQIRSEENMPGGGLSAGLASANSNVRIIVRDLSGKYSWDSAILYGPPPVSGLSEPTSFMLSLSHQEKPEEPPTSNECLEDITVKDGLSLQFKRFRETVPTWDTIRDEEDVLDELLQYLGVTSPECLQRTGISLNIPAPQPVCISEKQENDVINAILKQHTEEKEFVEKHFNDLNMKAVEQDEPIPQKPQSAFYYCRLLLSILGMNSWDKRRSFHLLKKNEKLLRELRNLDSRQCRETHKIAVFYVAEGQEDKHSILTNTGGSQAYEDFVAGLGWEVNLTNHCGFMGGLQKNKSTGLTTPYFATSTVEVIFHVSTRMPSDSDDSLTKKLRHLGNDEVHIVWSEHTRDYRRGIIPTEFGDVLIVIYPMKNHMFSIQIMKKPEVPFFGPLFDGAIVNGKVLPIMVRATAINASRALKSLIPLYQNFYEERARYLQTIVQHHLEPTTFEDFAAQVFSPAPYHHLPSDADH

SEQ ID NO: 448 - protein, 1771 aa, Homo sapien
MFSCLIPGFSAPQSEHGPRTLDNLINPPLNLQETQVTIEEITPLVPPQSGDKGQEDLTSYFLEALLKYIVIQRAAASLVSREESKNDNADKTDRTTEPEQSHSNTSTLTEREPSSSSLCSIDEEHLTDIEIVRRVFSSKRSNVNFVTEIFRQAFLLPICEAAAMRKVVKVYQEWIQQEEKPLFMQEPEEIVITSSDLPCIENVTDHDISMEEGEKREEENGTNTADHVRNSSWAKNGSYQGALHNASEEATEQNIRAGTQAVLQVFIINSSNIFLLEPANEIKNLLDEHTDMCKRILNIYRYMVVQVSMDKKTWEQMLLVLLRVTESVLKMPSQAFLQFQGKKNMTLAGRLAGPLFQTLIVAWIKANLNVYISRELWDDLLSVLSSLTYWEELATEWSLTMETLTKVLARNLYSLDLSDLPLDKLSEQKQKKHKGKGVGHEFQKVSVDKSFSRGWSRDQPGQAPMRQRSATTTGSPGTEKARSIVRQKTVDIDDAQILPRSTRVRHFSQSEETGNEVFGALNEEQPLPRSSSTSDILEPFTVERAKVNKEDMSQKLPPLNSDIGGSSANVPDLMDEFIAERLRSGNASTMTRRGSSPGSLEIPKDLPDILNKQNQMRPIDDPGVPSEWTSPASAGSSDLISSDSHSDSFSAFQYDGRKFDNFGFGTDTGVTSSADVDSGSGHHQSAEEQEVASLTTLHIDSETSSLNQQAFSAEVATITGSESASPVHSPLGSRSQTPSPSTLNIDHMEQKDLQLDEKLHHSVLQTPDDLEISEFPSECCSVMAGGTLTGWHADVATVMWRRMLGILGDVNSIMDPEIHAQVFDYLCELWQNLAKIRDNLGISTDNLTSPSPPVLIPPLRILTPWLFKATMLTDKYKQGKLHAYKLICNTMKRRQDVSPNRDFLTHFYNIMHCGLLHIDQDIVNTIIKHCSPQFFSLGLPGATMLIMDFIVAAGRVASSAFLNAPRVEAQVLLGSLVCFPNLYCELPSLHPNIPDVAVSQFTDVKELIIKTVLSSARDEPSGPARCVALCSLGIWICEELVHESHHPQIKEALNVICVSLKFTNKTVAHVACNMLHMLVHYVPRLQIYQPDSPLKIIQILIATITHLLPSTEASSYEMDKRLVVSLLLCLLDWIMALPLKTLLQPFHATGAESDKTEKSVLNCIYKVLHGCVYGAQCFSNPRYFPMSLSDLASVDYDPFMHLESLKEPEPLHSPDSERSSKLQPVTEVKTQMQHGLISIAARTVITHLVNHLGHYPMSGGPAMLTSQVCENHDNHYSESTELSPELFESPNIQFFVLNNTTLVSCIQIRSEENMPGGGLSAGLASANSNVRIIVRDLSGKYSWDSAILYGPPPVSGLSEPTSFMLSLSHQEKPEEPPTSNECLEDITVKDGLSLQFKRFRETVPTWDTIRDEEDVLDELLQYLGVTSPECLQRTGISLNIPAPQPVCISEKQENDVINAILKQHTEEKEFVEKHFNDLNMKAVEQDEPIPQKPQSAFYYCRLLLSILGMNSWDKRRSFHLLKKNEKLLRELRNLDSRQCRETHKIAVFYVAEGQEDKHSILTNTGGSQAYEDFVAGLGWEVNLTNHCGFMGGLQKNKSTGLTTPYFATSTVEVIFHVSTRMPSDSDDSLTKKLRHLGNDEVHIVWSEHTRDYRRGIIPTEFGDVLIVIYPMKNHMFSIQIMKKPEVPFFGPLFDGAIVNGKVLPIMVRATAINASRALKSLIPLYQNFYEERARYLQTIVQHHLEPTTFEDFAAQVFSPAPYHHLPSDADH

SEQ ID NO: 449 - protein, 1403 aa, Homo sapien
MKIATKKRNSVHVTFRPSTESVQFYNPLENKEAPWKMRLRKLGGFSSGSSNSSTSNTHTSTNSATELVKPGVYRPLDTLGTASVSSKTVKESTEIPTTILQKEGIASSQLGSRSTLRSSSHEAGLQQGSLGGVYKTVVHALSKPKANVSPQRQNRMPPEAPLRDLYSHVMGYFGRKAAVNKEDMSQKLPPLNSDIGGSSANVPDLMDEFIAERLRSGNASTMTRRGSSPGSLEIPKDLPDILNKQNQMRPIDDPGVPSEWTSPASAGSSDLISSDSHSDSFSAFQYDGRKFDNFGFGTDTGVTSSADVDSGSGHHQSAEEQEVASLTTLHIDSETSSLNQQAFSAEVATITGSESASPVHSPLGSRSQTPSPSTLNIDHMEQKDLQLDEKLHHSVLQTPDDLEISEFPSECCSVMAGGTLTGWHADVATVMWRRMLGILGDVNSIMDPEIHAQVFDYLCELWQNLAKIRDNLGISTDNLTSPSPPVLIPPLRILTPWLFKATMLTDKYKQGKLHAYKLICNTMKRRQDVSPNRDFLTHFYNIMHCGLLHIDQDIVNTIIKHCSPQFFSLGLPGATMLIMDFIVAAGRVASSAFLNAPRVEAQVLLGSLVCFPNLYCELPSLHPNIPDVAVSQFTDVKELIIKTVLSSARDEPSGPARCVALCSLGIWICEELVHESHHPQIKEALNVICVSLKFTNKTVAHVACNMLHMLVHYVPRLQIYQPDSPLKIIQILIATITHLLPSTEASSYEMDKRLVVSLLLCLLDWIMALPLKTLLQPFHATGAESDKTEKSVLNCIYKVLHGCVYGAQCFSNPRYFPMSLSDLASVDYDPFMHLESLKEPEPLHSPDSERSSKLQPVTEVKTQMQHGLISIAARTVITHLVNHLGHYPMSGGPAMLTSQVCENHDNHYSESTELSPELFESPNIQFFVLNNTTLVSCIQIRSEENMPGGGLSAGLASANSNVRIIVRDLSGKYSWDSAILYGPPPVSGLSEPTSFMLSLSHQEKPEEPPTSNECLEDITVKDGLSLQFKRFRETVPTWDTIRDEEDVLDELLQYLGVTSPECLQRTGISLNIPAPQPVCISEKQENDVINAILKQHTEEKEFVEKHFNDLNMKAVEQDEPIPQKPQSAFYYCRLLLSILGMNSWDKRRSFHLLKKNEKLLRELRNLDSRQCRETHKIAVFYVAEGQEDKHSILTNTGGSQAYEDFVAGLGWEVNLTNHCGFMGGLQKNKSTGLTTPYFATSTVEVIFHVSTRMPSDSDDSLTKKLRHLGNDEVHIVWSEHTRDYRRGIIPTEFGDVLIVIYPMKNHMFSIQIMKKPEVPFFGPLFDGAIVNGKVLPIMVRATAINASRALKSLIPLYQNFYEERARYLQTIVQHHLEPTTFEDFAAQVFSPAPYHHLPSDADH

SEQ ID NO: 450 - protein, 1909 aa, Homo sapien
MFSCLIPGFSAPQSEHGPRTLDNLINPPLNLQETQVTIEEITPLVPPQSGDKGQEDLTSYFLEALLKYIVIQVKSLEWKNKENQERGFSFLFSHFKKYYLPYIFPNICKENSLYHPILDIPQMRPKPHYVVIKKDAETNEAIYCTKEPFIKARVIVIRWLVSFWLEPKPHTGPHIPGMEGEVLPKNIQRAAASLVSREESKNDNADKTDRTTEPEQSHSNTSTLTEREPSSSSLCSIDEEHLTDIEIVRRVFSSKRSNVNFVTEIFRQAFLLPICEAAAMRKVVKVYQEWIQQEEKPLFMQEPEEIVITSSDLPCIENVTDHDISMEEGEKREEENGTNTADHVRNSSWAKNGSYQGALHNASEEATEQNIRAGTQAVLQVFIINSSNIFLLEPANEIKNLLDEHTDMCKRILNIYRYMVVQVSMDKKTWEQMLLVLLRVTESVLKMPSQAFLQFQGKKNMTLAGRLAGPLFQTLIVAWIKANLNVYISRELWDDLLSVLSSLTYWEELATEWSLTMETLTKVLARNLYSLDLSDLPLDKLSEQKQKKHKGKGVGHEFQKVSVDKSFSRGWSRDQPGQAPMRQRSATTTGSPGTEKARSIVRQKTVDIDDAQILPRSTRVRHFSQSEETGNEVFGALNEEQPLPRSSSTSDILEPFTVERAKVNKEDMSQKLPPLNSDIGGSSANVPDLMDEFIAERLRSGNASTMTRRGSSPGSLEIPKDLPDILNKQNQMRPIDDPGVPSEWTSPASAGSSDLISSDSHSDSFSAFQYDGRKFDNFGFGTDTGVTSSADVDSGSGHHQSAEEQEVASLTTLHIDSETSSLNQQAFSAEVATITGSESASPVHSPLGSRSQTPSPSTLNIDHMEQKDLQLDEKLHHSVLQTPDDLEISEFPSECCSVMAGGTLTGWHADVATVMWRRMLGILGDVNSIMDPEIHAQVFDYLCELWQNLAKIRDNLGISTDNLTSPSPPVLIPPLRILTPWLFKATMLTDKYKQGKLHAYKLICNTMKRRQDVSPNRDFLTHFYNIMHCGLLHIDQDIVNTIIKHCSPQFFSLGLPGATMLIMDFIVAAGRVASSAFLNAPRVEAQVLLGSLVCFPNLYCELPSLHPNIPDVAVSQFTDVKELIIKTVLSSARDEPSGPARCVALCSLGIWICEELVHESHHPQIKEALNVICVSLKFTNKTVAHVACNMLHMLVHYVPRLQIYQPDSPLKIIQILIATITHLLPSTEASSYEMDKRLVVSLLLCLLDWIMALPLKTLLQPFHATGAESDKTEKSVLNCIYKVLHGCVYGAQCFSNPRYFPMSLSDLASVDYDPFMHLESLKEPEPLHSPDSERSSKLQPVTEVKTQMQHGLISIAARTVITHLVNHLGHYPMSGGPAMLTSQVCENHDNHYSESTELSPELFESPNIQFFVLNNTTLVSCIQIRSEENMPGGGLSAGLASANSNVRIIVRDLSGKYSWDSAILYGPPPVSGLSEPTSFMLSLSHQEKPEEPPTSNECLEDITVKDGLSLQFKRFRETVPTWDTIRDEEDVLDELLQYLGVTSPECLQRTGISLNIPAPQPVCISEKQENDVINAILKQHTEEKEFVEKHFNDLNMKAVEQDEPIPQKPQSAFYYCRLLLSILGMNSWDKRRSFHLLKKNEKLLRELRNLDSRQCRETHKIAVFYVAEGQEDKHSILTNTGGSQAYEDFVAGLGWEVNLTNHCGFMGGLQKNKSTGLTTPYFATSTVEVIFHVSTRMPSDSDDSLTKKIQVYDTYVFLLSEELVLTFLEELRHLGNDEVHIVWSEHTRDYRRGIIPTEFGDVLIVIYPMKNHMFSIQIMKKPEVPFFGPLFDGAIVNGKVLPIMVRATAINASRALKSLIPLYQNFYEERARYLQTIVQHHLEPTTFEDFAAQVFSPAPYHHLPSDADH

SEQ ID NO: 451 - protein, 1704 aa, Homo sapien
MFSCLIPGFSAPQSEHGPRTLDNLINPPLNLQETQVTIEEITPLVPPQSGDKGQEDLTSYFLEALLKYIVIQVKSLEWKNKENQERGFSFLFSHFKKYYLPYIFPNICKENSLYHPILDIPQMRPKPHYVVIKKDAETNEAIYCTKEPFIKARVIVIRWLVSFWLEPKPHTGPHIPGMEGEVLPKNIQRAAASLVSREESKNDNADKTDRTTEPEQSHSNTSTLTEREPSSSSLCSIDEEHLTDIEIVRRVFSSKRSNVNFVTEIFRQAFLLPICEAAAMRKVVKVYQEWIQQEEKPLFMQEPEEIVITSSDLPCIENVTDHDISMEEGEKREEENGTNTADHVRNSSWAKNGSYQGALHNASEEATEQNIRAGTQAVLQVFIINSSNIFLLEPANEIKNLLDEHTDMCKRILNIYRYMVVQVSMDKKTWEQMLLVLLRVTESVLKMPSQAFLQFQGKKNMTLAGRLAGPLFQTLIVAWIKANLNVYISRELWDDLLSVLSSLTYWEELATEWSLTMETLTKVLARNLYSLDLSDLPLDKLSEQKQKKHKGKGVGHEFQKVSVDKSFSRGWSRDQPGQAPMRQRSATTTGSPGTEKARSIVRQKTVDIDDAQILPRSTRVRHFSQSEETGNEVFGALNEEQPLPRSSSTSDILEPFTVERAKVNKEDMSQKLPPLNSDIGGSSANVPDLMDEFIAERLRSGNASTMTRRGSSPGSLEIPKDLPDILNKQNQMRPIDDPGVPSEWTSPASAGSSDLISSDSHSDSFSAFQYDGRKFDNFGFGTDTGVTSSADVDSGSGHHQSAEEQEVASLTTLHIDSETSSLNQQAFSAEVATITGSESASPVHSPLGSRSQTPSPSTLNIDHMEQKDLQLDEKLHHSVLQTPDDLEISEFPSECCSVMAGGTLTGWHADVATVMWRRMLGILGDVNSIMDPEIHAQVFDYLCELWQNLAKIRDNLGISTDNLTSPSPPVLIPPLRILTPWLFKATMLTDKYKQGKLHAYKLICNTMKRRQDVSPNRDFLTHFYNIMHCGLLHIDQDIVNTIIKHCSPQFFSLGLPGATMLIMDFIVAAGRVASSAFLNAPRVEAQVLLGSLVCFPNLYCELPSLHPNIPDVAVSQFTDVKELIIKTVLSSARDEPSGPARCVALCSLGIWICEELVHESHHPQIKEALNVICVSLKFTNKTVAHVACNMLHMLVHYVPRLQIYQPDSPLKIIQILIATITHLLPSTEASSYEMDKRLVVSLLLCLLDWIMALPLKTLLQPFHATGAESDKTEKSVLNCIYKVLHGCVYGAQCFSNPRYFPMSLSDLASVDYDPFMHLESLKEPEPLHSPDSERSSKLQPVTEVKTQMQHGLISIAARTVITHLVNHLGHYPMSGGPAMLTSQVCENHDNHYSESTELSPELFESPNIQFFVLNNTTLVSCIQIRSEENMPGGGLSAGLASANSNVRIIVRDLSGKYSWDSAILYGPPPVSGLSEPTSFMLSLSHQEKPEEPPTSNECLEDITVKDGLSLQFKRFRETVPTWDTIRDEEDVLDELLQYLGVTSPECLQRTGISLNIPAPQPVCISEKQENDVINAILKQHTEEKEFVEKHFNDLNMKAVEQDEPIPQKPQSAFYYCRLLLSILGMNSWDKRRSFHLLKKNEKLLRELRNLDSRQCRETHKIAVFYVAEGQEDKHSILTNTGGSQAYEDFVAGLGWELIIFKLYE

SEQ ID NO: 452 - protein, 1239 aa, Homo sapien
MFSCLIPGFSAPQSEHGPRTLDNLINPPLNLQETQVTIEEITPLVPPQSGDKGQEDLTSYFLEALLKYIVIQVKSLEWKNKENQERGFSFLFSHFKKYYLPYIFPNICKENSLYHPILDIPQMRPKPHYVVIKKDAETNEAIYCTKEPFIKARVIVIRWLVSFWLEPKPHTGPHIPGMEGEVLPKNIQRAAASLVSREESKNDNADKTDRTTEPEQSHSNTSTLTEREPSSSSLCSIDEEHLTDIEIVRRVFSSKRSNVNFVTEIFRQAFLLPICEAAAMRKVVKVYQEWIQQEEKPLFMQEPEEIVITSSDLPCIENVTDHDISMEEGEKREEENGTNTADHVRNSSWAKNGSYQGALHNASEEATEQNIRAGTQAVLQVFIINSSNIFLLEPANEIKNLLDEHTDMCKRILNIYRYMVVQVSMDKKTWEQMLLVLLRVTESVLKMPSQAFLQFQGKKNMTLAGRLAGPLFQTLIVAWIKANLNVYISRELWDDLLSVLSSLTYWEELATEWSLTMETLTKVLARNLYSLDLSDLPLDKLSEQKQKKHKGKGVGHEFQKVSVDKSFSRGWSRDQPGQAPMRQRSATTTGSPGTEKARSIVRQKTVDIDDAQILPRSTRVRHFSQSEETGNEVFGALNEEQPLPRSSSTSDILEPFTVERAKVNKEDMSQKLPPLNSDIGGSSANVPDLMDEFIAERLRSGNASTMTRRGSSPGSLEIPKDLPDILNKQNQMRPIDDPGVPSEWTSPASAGSSDLISSDSHSDSFSAFQYDGRKFDNFGFGTDTGVTSSADVDSGSGHHQSAEEQEVASLTTLHIDSETSSLNQQAFSAEVATITGSESASPVHSPLGSRSQTPSPSTLNIDHMEQKDLQLDEKLHHSVLQTPDDLEISEFPSECCSVMAGGTLTGWHADVATVMWRRMLGILGDVNSIMDPEIHAQVFDYLCELWQNLAKIRDNLGISTDNLTSPSPPVLIPPLRILTPWLFKATMLTDKYKQGKLHAYKLICNTMKRRQDVSPNRDFLTHFYNIMHCGLLHIDQDIVNTIIKHCSPQFFSLGLPGATMLIMDFIVAAGRVASSAFLNAPRVEAQVLLGSLVCFPNLYCELPSLHPNIPDVAVSQFTDVKELIIKTVLSSARDEPSGPARCVALCSLGIWICEELVHESHHPQIKEALNVICVSLKFTNKTVAHVACNMLHMLVHYVPRLQIYQPDSPLKIIQILIATITHLLPSTEASSYEMDKRVI

SEQ ID NO: 453 - protein, 849 aa, Homo sapien
MFSCLIPGFSAPQSEHGPRTLDNLINPPLNLQETQVTIEEITPLVPPQSGDKGQEDLTSYFLEALLKYIVIQVKSLEWKNKENQERGFSFLFSHFKKYYLPYIFPNICKENSLYHPILDIPQMRPKPHYVVIKKDAETNEAIYCTKEPFIKARVIVIRWLVSFWLEPKPHTGPHIPGMEGEVLPKNIQRAAASLVSREESKNDNADKTDRTTEPEQSHSNTSTLTEREPSSSSLCSIDEEHLTDIEIVRRVFSSKRSNVNFVTEIFRQAFLLPICEAAAMRKVVKVYQEWIQQEEKPLFMQEPEEIVITSSDLPCIENVTDHDISMEEGEKREEENGTNTADHVRNSSWAKNGSYQGALHNASEEATEQNIRAGTQAVLQVFIINSSNIFLLEPANEIKNLLDEHTDMCKRILNIYRYMVVQVSMDKKTWEQMLLVLLRVTESVLKMPSQAFLQFQGKKNMTLAGRLAGPLFQTLIVAWIKANLNVYISRELWDDLLSVLSSLTYWEELATEWSLTMETLTKVLARNLYSLDLSDLPLDKLSEQKQKKHKGKGVGHEFQKVSVDKSFSRGWSRDQPGQAPMRQRSATTTGSPGTEKARSIVRQKTVDIDDAQILPRSTRVRHFSQSEETGNEVFGALNEEQPLPRSSSTSDILEPFTVERAKVNKEDMSQKLPPLNSDIGGSSANVPDLMDEFIAERLRSGNASTMTRRGSSPGSLEIPKDLPDILNKQNQMRPIDDPGVPSEWTSPASAGSSDLISSDSHSDSFSAFQYDGRKFDNFGFGTDTGVTSSADVDSGSGHHQSAEEQEVASLTTLHIDSETSSLNQQAFSAEVATITGKVIHGNVFLKCIF

SEQ ID NO: 454 - protein, 284 aa, Homo sapien
MFSCLIPGFSAPQSEHGPRTLDNLINPPLNLQETQVTIEEITPLVPPQSGDKGQEDLTSYFLEALLKYIVIQVKSLEWKNKENQERGFSFLFSHFKKYYLPYIFPNICKENSLYHPILDIPQMRPKPHYVVIKKDAETNEAIYCTKEPFIKARVIVIRWLVSFWLEPKPHTGPHIPGMEGEVLPKNIQRAAASLVSREESKNDNADKTDRTTEPEQSHSNTSTLTEREPSSSSLCSIDEEHLTDIEIVRRVFSSKRSNVNFVTEIFRQVTYLSVFLIYKEGFYL

SEQ ID NO: 455 - protein, 607 aa, Homo sapien
MFSCLIPGFSAPQSEHGPRTLDNLINPPLNLQETQVTIEEITPLVPPQSGDKGQEDLTSYFLEALLKYIVIQVKSLEWKNKENQERGFSFLFSHFKKYYLPYIFPNICKENSLYHPILDIPQMRPKPHYVVIKKDAETNEAIYCTKEPFIKARVIVIRWLVSFWLEPKPHTGPHIPGMEGEVLPKNIQRAAASLVSREESKNDNADKTDRTTEPEQSHSNTSTLTEREPSSSSLCSIDEEHLTDIEIVRRVFSSKRSNVNFVTEIFRQAFLLPICEAAAMRKVVKVYQEWIQQEEKPLFMQEPEEIVITSSDLPCIENVTDHDISMEEGEKREEENGTNTADHVRNSSWAKNGSYQGALHNASEEATEQNIRAGTQAVLQVFIINSSNIFLLEPANEIKNLLDEHTDMCKRILNIYRYMVVQVSMDKKTWEQMLLVLLRVTESVLKMPSQAFLQFQGKKNMTLAGRLAGPLFQTLIVAWIKANLNVYISRELWDDLLSVLSSLTYWEELATEWSLTMETLTKVLARNLYSLDLSDLPLDKLSEQKQKKHKGKGVGHEFQKVSVDKSFSRGWSRDQPGQAPMRQRSATTTGSPGTEKARSIVRQKTVG

SEQ ID NO: 456 - protein, 1934 aa, Homo sapien
MFSCLIPGFSAPQSEHGPRTLDNLINPPLNLQETQVTIEEITPLVPPQSGDKGQEDLTSYFLEALLKYIVIQVKSLEWKNKENQERGFSFLFSHFKKYYLPYIFPNICKENSLYHPILDIPQMRPKPHYVVIKKDAETNEAIYCTKEPFIKARVIVIRWLVSFWLEPKPHTGPHIPGMEGEVLPKNIQRAAASLVSREESKNDNADKTDRTTEPEQSHSNTSTLTEREPSSSSLCSIDEEHLTDIEIVRRVFSSKRSNVNFVTEIFRQAFLLPICEAAAMRKVVKVYQEWIQQEEKPLFMQEPEEIVITSSDLPCIENVTDHDISMEEGEKREEENGTNTADHVRNSSWAKNGSYQGALHNASEEATEQNIRAGTQAVLQVFIINSSNIFLLEPANEIKNLLDEHTDMCKRILNIYRYMVVQVSMDKKTWEQMLLVLLRVTESVLKMPSQAFLQFQGKKNMTLAGRLAGPLFQTLIVAWIKANLNVYISRELWDDLLSVLSSLTYWEELATEWSLTMETLTKVLARNLYSLDLSDLPLDKLSEQKQKKHKGKGVGHEFQKVSVDKSFSRGWSRDQPGQAPMRQRSATTTGSPGTEKARSIVRQKTVAMRSRSIGECALPSAYIRSAKSAPVLIHTSKPFLPDIVLTPLSDELSDIDDAQILPRSTRVRHFSQSEETGNEVFGALNEEQPLPRSSSTSDILEPFTVERAKVNKEDMSQKLPPLNSDIGGSSANVPDLMDEFIAERLRSGNASTMTRRGSSPGSLEIPKDLPDILNKQNQMRPIDDPGVPSEWTSPASAGSSDLISSDSHSDSFSAFQYDGRKFDNFGFGTDTGVTSSADVDSGSGHHQSAEEQEVASLTTLHIDSETSSLNQQAFSAEVATITGSESASPVHSPLGSRSQTPSPSTLNIDHMEQKDLQLDEKLHHSVLQTPDDLEISEFPSECCSVMAGGTLTGWHADVATVMWRRMLGILGDVNSIMDPEIHAQVFDYLCELWQNLAKIRDNLGISTDNLTSPSPPVLIPPLRILTPWLFKATMLTDKYKQGKLHAYKLICNTMKRRQDVSPNRDFLTHFYNIMHCGLLHIDQDIVNTIIKHCSPQFFSLGLPGATMLIMDFIVAAGRVASSAFLNAPRVEAQVLLGSLVCFPNLYCELPSLHPNIPDVAVSQFTDVKELIIKTVLSSARDEPSGPARCVALCSLGIWICEELVHESHHPQIKEALNVICVSLKFTNKTVAHVACNMLHMLVHYVPRLQIYQPDSPLKIIQILIATITHLLPSTEASSYEMDKRLVVSLLLCLLDWIMALPLKTLLQPFHATGAESDKTEKSVLNCIYKVLHGCVYGAQCFSNPRYFPMSLSDLASVDYDPFMHLESLKEPEPLHSPDSERSSKLQPVTEVKTQMQHGLISIAARTVITHLVNHLGHYPMSGGPAMLTSQVCENHDNHYSESTELSPELFESPNIQFFVLNNTTLVSCIQIRSEENMPGGGLSAGLASANSNVRIIVRDLSGKYSWDSAILYGPPPVSGLSEPTSFMLSLSHQEKPEEPPTSNECLEDITVKDGLSLQFKRFRETVPTWDTIRDEEDVLDELLQYLGVTSPECLQRTGISLNIPAPQPVCISEKQENDVINAILKQHTEEKEFVEKHFNDLNMKAVEQDEPIPQKPQSAFYYCRLLLSILGMNSWDKRRSFHLLKKNEKLLRELRNLDSRQCRETHKIAVFYVAEGQEDKHSILTNTGGSQAYEDFVAGLGWEVNLTNHCGFMGGLQKNKSTGLTTPYFATSTVEVIFHVSTRMPSDSDDSLTKKLRHLGNDEVHIVWSEHTRDYRRGIIPTEFGDVLIVIYPMKNHMFSIQIMKKPEVPFFGPLFDGAIVNGKVLPIMVRATAINASRALKSLIPLYQNFYEERARYLQTIVQHHLEPTTFEDFAAQVFSPAPYHHLPSDADH

SEQ ID NO: 457 - protein, 1220 aa, Homo sapien [sequence omitted]

SEQ ID NO: 458 - protein, 1126 aa, Homo sapien
MFSCLIPGFSAPQSEHGPRTLDNLINPPLNLQETQVTIEEITPLVPPQSGDKGQEDLTSYFLEALLKYIVIQVKSLEWKNKENQERGFSFLFSHFKKYYLPYIFPNICKENSLYHPILDIPQMRPKPHYVVIKKDAETNEAIYCTKEPFIKARVIVIRWLVSFWLEPKPHTGPHIPGMEGEVLPKNIQRAAASLVSREESKNDNADKTDRTTEPEQSHSNTSTLTEREPSSSSLCSIDEEHLTDIEIVRRVFSSKRSNVNFVTEIFRQAFLLPICEAAAMRKVVKVYQEWIQQEEKPLFMQEPEEIVITSSDLPCIENVTDHDISMEEGEKREEENGTNTADHVRNSSWAKNGSYQGALHNASEEATEQNIRAGTQAVLQVFIINSSNIFLLEPANEIKNLLDEHTDMCKRILNIYRYMVVQVSMDKKTWEQMLLVLLRVTESVLKMPSQAFLQFQGKKNMTLAGRLAGPLFQTLIVAWIKANLNVYISRELWDDLLSVLSSLTYWEELATEWSLTMETLTKVLARNLYSLDLSDLPLDKLSEQKQKKHKGKGVGHEFQKVSVDKSFSRGWSRDQPGQAPMRQRSATTTGSPGTEKARSIVRQKTVDIDDAQILPRSTRVRHFSQSEETGNEVFGALNEEQPLPRSSSTSDILEPFTVERAKVNKEDMSQKLPPLNSDIGGSSANVPDLMDEFIAERLRSGNASTMTRRGSSPGSLEIPKDLPDILNKQNQMRPIDDPGVPSEWTSPASAGSSDLISSDSHSDSFSAFQYDGRKFDNFGFGTDTGVTSSADVDSGSGHHQSAEEQEVASLTTLHIDSETSSLNQQAFSAEVATITGSESASPVHSPLGSRSQTPSPSTLNIDHMEQKDLQLDEKLHHSVLQTPDDLEISEFPSECCSVMAGGTLTGWHADVATVMWRRMLGILGDVNSIMDPEIHAQVFDYLCELWQNLAKIRDNLGISTDNLTSPSPPVLIPPLRILTPWLFKATMLTDKYKQGKLHAYKLICNTMKRRQDVSPNRDFLTHFYNIMHCGLLHIDQDIVNTIIKHCSPQFFSLGLPGATMLIMDFIVAAGRVASSAFLNAPRVEAQVLLGSLVCFPNLYCELPSLHPNIPDVAVSQFTDVKMCSTL

SEQ ID NO: 459 - protein, 1894 aa, Homo sapien
MFSCLIPGFSAPQSEHGPRTLDNLINPPLNLQETQVTIEEITPLVPPQSGDKGQEDLTSYFLEALLKYIVIQVKSLEWKNKENQERGFSFLFSHFKKYYLPYIFPNICKENSLYHPILDIPQMRPKPHYVVIKKDAETNEAIYCTKEPFIKARVIVIRWLVSFWLEPKPHTGPHIPGMEGEVLPKNIQRAAASLVSREESKNDNADKTDRTTEPEQSHSNTSTLTEREPSSSSLCSIDEEHLTDIEIVRRVFSSKRSNVNFVTEIFRQAFLLPICEAAAMRKVVKVYQEWIQQEEKPLFMQEPEEIVITSSDLPCIENVTDHDISMEEGEKREEENGTNTADHVRNSSWAKNGSYQGALHNASEEATEQNIRAGTQAVLQVFIINSSNIFLLEPANEIKNLLDEHTDMCKRILNIYRYMVVQVSMDKKTWEQMLLVLLRVTESVLKMPSQAFLQFQGKKNMTLAGRLAGPLFQTLIVAWIKANLNVYISRELWDDLLSVLSSLTYWEELATEWSLTMETLTKVLARNLYSLDLSDLPLDKLSEQKQKKHKGKGVGHEFQKVSVDKSFSRGWSRDQPGQAPMRQRSATTTGSPGTEKARSIVRQKTVDIDDAQILPRSTRVRHFSQSEETGNEVFGALNEEQPLPRSSSTSDILEPFTVERAKVNKEDMSQKLPPLNSDIGGSSANVPDLMDEFIAERLRSGNASTMTRRGSSPGSLEIPKDLPDILNKQNQMRPIDDPGVPSEWTSPASAGSSDLISSDSHSDSFSAFQYDGRKFDNFGFGTDTGVTSSADVDSGSGHHQSAEEQEVASLTTLHIDSETSSLNQQAFSAEVATITGSESASPVHSPLGSRSQTPSPSTLNIDHMEQKDLQLDEKLHHSVLQTPDDLEISEFPSECCSVMAGGTLTGWHADVATVMWRRMLGILGDVNSIMDPEIHAQVFDYLCELWQNLAKIRDNLGISTDNLTSPSPPVLIPPLRILTPWLFKATMLTDKYKQGKLHAYKLICNTMKRRQDVSPNRDFLTHFYNIMHCGLLHIDQDIVNTIIKHCSPQFFSLGLPGATMLIMDFIVAAGRVASSAFLNAPRVEAQVLLGSLVCFPNLYCELPSLHPNIPDVAVSQFTDVKELIIKTVLSSARDEPSGPARCVALCSLGIWICEELVHESHHPQIKEALNVICVSLKFTNKTVAHVACNMLHMLVHYVPRLQIYQPDSPLKIIQILIATITHLLPSTEASSYEMDKRLVVSLLLCLLDWIMALPLKTLLQPFHATGAESDKTEKSVLNCIYKVLHGCVYGAQCFSNPRYFPMSLSDLASVDYDPFMHLESLKEPEPLHSPDSERSSKLQPVTEVKTQMQHGLISIAARTVITHLVNHLGHYPMSGGPAMLTSQVCENHDNHYSESTELSPELFESPNIQFFVLNNTTLVSCIQIRSEENMPGGGLSAGLASANSNVRIIVRDLSGKYSWDSAILYGPPPVSGLSEPTSFMLSLSHQEKPEEPPTSNECLEDITVKDGLSLQFKRFRETVPTWDTIRDEEDVLDELLQYLGVTSPECLQRTGISLNIPAPQPVCISEKQENDVINAILKQHTEEKEFVEKHFNDLNMKAVEQDEPIPQKPQSAFYYCRLLLSILGMNSWDKRRSFHLLKKNEKLLRELRNLDSRQCRETHKIAVFYVAEGQEDKHSILTNTGGSQAYEDFVAGLGWEVNLTNHCGFMGGLQKNKSTGLTTPYFATSTVEVIFHVSTRMPSDSDDSLTKKLRHLGNDEVHIVWSEHTRDYRRGIIPTEFGDVLIVIYPMKNHMFSIQIMKKPEVPFFGPLFDGAIVNGKVLPIMVRATAINASRALKSLIPLYQNFYEERARYLQTIVQHHLEPTTFEDFAAQVFSPAPYHHLPSDAGLLPRDSTQ

SEQ ID NO: 460 - protein, 1867 aa, Homo sapien
MFSCLIPGFSAPQSEHGPRTLDNLINPPLNLQETQVTIEEITPLVPPQSGDKGQEDLTSYFLEALLKYIVIQVKSLEWKNKENQERGFSFLFSHFKKYYLPYIFPNICKENSLYHPILDIPQMRPKPHYVVIKKDAETNEAIYCTKEPFIKARVIVIRWLVSFWLEPKPHTGPHIPGMEGEVLPKNIQRAAASLVSREESKNDNADKTDRTTEPEQSHSNTSTLTEREPSSSSLCSIDEEHLTDIEIVRRVFSSKRSNVNFVTEIFRQAFLLPICEAAAMRKVVKVYQEWIQQEEKPLFMQEPEEIVITSSDLPCIENVTDHDISMEEGEKREEENGTNTADHVRNSSWAKNGSYQGALHNASEEATEQNIRAGTQAVLQVFIINSSNIFLLEPANEIKNLLDEHTDMCKRILNIYRYMVVQVSMDKKTWEQMLLVLLRVTESVLKMPSQAFLQFQGKKNMTLAGRLAGPLFQTLIVAWIKANLNVYISRELWDDLLSVLSSLTYWEELATEWSLTMETLTKVLARNLYSLDLSDLPLDKLSEQKQKKHKGKGVGHEFQKVSVDKSFSRGWSRDQPGQAPMRQRSATTTGSPGTEKARSIVRQKTVDIDDAQILPRSTRVRHFSQSEETGNEVFGALNEEQPLPRSSSTSDILEPFTVERAKVNKEDMSQKLPPLNSDIGGSSANVPDLMDEFIAERLRSGNASTMTRRGSSPGSLEIPKDLPDILNKQNQMRPIDDPGVPSEWTSPASAGSSDLISSDSHSDSFSAFQYDGRKFDNFGFGTDTGVTSSADVDSGSGHHQSAEEQEVASLTTLHIDSETSSLNQQAFSAEVATITGSESASPVHSPLGSRSQTPSPSTLNIDHMEQKDLQLDEKLHHSVLQTPDDLEISEFPSECCSVMAGGTLTGWHADVATVMWRRMLGILGDVNSIMDPEIHAQVFDYLCELWQNLAKIRDNLGISTDNLTSPSPPVLIPPLRILTPWLFKATMLTDKYKQGKLHAYKLICNTMKRRQDVSPNRDFLTHFYNIMHCGLLHIDQDIVNTIIKHCSPQFFSLGLPGATMLIMDFIVAAGRVASSAFLNAPRVEAQVLLGSLVCFPNLYCELPSLHPNIPDVAVSQFTDVKELIIKTVLSSARDEPSGPARCVALCSLGIWICEELVHESHHPQIKEALNVICVSLKFTNKTVAHVACNMLHMLVHYVPRLQIYQPDSPLKIIQILIATITHLLPSTEASSYEMDKRLVVSLLLCLLDWIMALPLKTLLQPFHATGAESDKTEKSVLNCIYKVLHGCVYGAQCFSNPRYFPMSLSDLASVDYDPFMHLESLKEPEPLHSPDSERSSKLQPVTEVKTQMQHGLISIAARTVITHLVNHLGHYPMSGGPAMLTSQVCENHDNHYSESTELSPELFESPNIQFFVLNNTTLVSCIQIRSEENMPGGGLSAGLASANSNVRIIVRDLSGKYSWDSAILYGPPPVSGLSEPTSFMLSLSHQEKPEEPPTSNECLEDITVKDGLSLQFKRFRETVPTWDTIRDEEDVLDELLQYLGVTSPECLQRTGISLNIPAPQPVCISEKQENDVINAILKQHTEEKEFVEKHFNDLNMKAVEQDEPIPQKPQSAFYYCRLLLSILGMNSWDKRRSFHLLKKNEKLLRELRNLDSRQCRETHKIAVFYVAEGQEDKHSILTNTGGSQAYEDFVAGLGWEVNLTNHCGFMGGLQKNKSTGLTTPYFATSTVELRHLGNDEVHIVWSEHTRDYRRGIIPTEFGDVLIVIYPMKNHMFSIQIMKKPEVPFFGPLFDGAIVNGKVLPIMVRATAINASRALKSLIPLYQNFYEERARYLQTIVQHHLEPTTFEDFAAQVFSPAPYHHLPSDADH

SEQ ID NO: 461 - protein, 1906 aa, Homo sapien
MFSCLIPGFSAPQSEHGPRTLDNLINPPLNLQETQVTIEEITPLVPPQSGDKGQEDLTSYFLEALLKYIVIQVKSLEWKNKENQERGFSFLFSHFKKYYLPYIFPNICKENSLYHPILDIPQMRPKPHYVVIKKDAETNEAIYCTKEPFIKARVIVIRWLVSFWLEPKPHTGPHIPGMEGEVLPKNIQRAAASLVSREESKNDNADKTDRTTEPEQSHSNTSTLTEREPSSSSLCSIDEEHLTDIEIVRRVFSSKRSNVNFVTEIFRQAFLLPICEAAAMRKVVKVYQEWIQQEEKPLFMQEPEEIVITSSDLPCIENVTDHDISMEEGEKREEENGTNTADHVRNSSWAKNGSYQGALHNASEEATEQNIRAGTQAVLQVFIINSSNIFLLEPANEIKNLLDEHTDMCKRILNIYRYMVVQVSMDKKTWEQMLLVLLRVTESVLKMPSQAFLQFQGKKNMTLAGRLAGPLFQTLIVAWIKANLNVYISRELWDDLLSVLSSLTYWEELATEWSLTMETLTKVLARNLYSLDLSDLPLDKLSEQKQKKHKGKGVGHEFQKVSVDKSFSRGWSRDQPGQAPMRQRSATTTGSPGTEKARSIVRQKTVDIDDAQILPRSTRVRHFSQSEETGNEVFGALNEEQPLPRSSSTSDILEPFTVERAKVNKEDMSQKLPPLNSDIGGSSANVPDLMDEFIAERLRSGNASTMTRRGSSPGSLEIPKDLPDILNKQNQMRPIDDPGVPSEWTSPASAGSSDLISSDSHSDSFSAFQYDGRKFDNFGFGTDTGVTSSADVDSGSGHHQSAEEQEVASLTTLHIDSETSSLNQQAFSAEVATITGSESASPVHSPLGSRSQTPSPSTLNIDHMEQKDLQLDEKLHHSVLQTPDDLEISEFPSECCSVMAGGTLTGWHADVATVMWRRMLGILGDVNSIMDPEIHAQVFDYLCELWQNLAKIRDNLGISTDNLTSPSPPVLIPPLRILTPWLFKATMLTDKYKQGKLHAYKLICNTMKRRQDVSPNRDFLTHFYNIMHCGLLHIDQDIVNTIIKHCSPQFFSLGLPGATMLIMDFIVAAGRVASSAFLNAPRVEAQVLLGSLVCFPNLYCELPSLHPNIPDVAVSQFTDVKELIIKTVLSSARDEPSGPARCVALCSLGIWICEELVHESHHPQIKEALNVICVSLKFTNKTVAHVACNMLHMLVHYVPRLQIYQPDSPLKIIQILIATITHLLPSTEASSYEMDKRLVVSLLLCLLDWIMALPLKTLLQPFHATGAESDKTEKSVLNCIYKVLHGCVYGAQCFSNPRYFPMSLSDLASVDYDPFMHLESLKEPEPLHSPDSERSSKLQPVTEVKTQMQHGLISIAARTVITHLVNHLGHYPMSGGPAMLTSQVCENHDNHYSESTELSPELFESPNIQFFVLNNTTLVSCIQIRSEENMPGGGLSAGLASANSNVRIIVRDLSGKYSWDSAILYGPPPVSGLSEPTSFMLSLSHQEKPEEPPTSNECLEDITVKDGLSLQFKRFRETVPTWDTIRDEEDVLDELLQYLGVTSPECLQRTGISLNIPAPQPVCISEKQENDVINAILKQHTEEKEFVEKHFNDLNMKAVEQDEPIPQKPQSAFYYCRLLLSILGMNSWDKRRSFHLLKKNEKLLRELRNLDSRQCRETHKIAVFYVAEGQEDKHSILTNTGGSQAYEDFVAGLGWEVNLTNHCGFMGGLQKNKSTGLTTPYFATSTVEVIFHVSTRMPSDSDDSLTKKLRHLGNDEVHIVWSEHTRDYRRGIIPTEFGDVLIVIYPMKNHMFSIQIMKKPEVPFFGPLFDGAIVNGKVLPIMVRATAINASRALKSLIPLYQNLRREHDIFKCCWFYVVLDNCLQVSCSHHLEPTTFEDFAAQVFSPAPYHHLPSDAGLLPRDSTQ

SEQ ID NO: 462 - protein, 1889 aa, Homo sapien
MFSCLIPGFSAPQSEHGPRTLDNLINPPLNLQETQVTIEEITPLVPPQSGDKGQEDLTSYFLEALLKYIVIQVKSLEWKNKENQERGFSFLFSHFKKYYLPYIFPNICKENSLYHPILDIPQMRPKPHYVVIKKDAETNEAIYCTKEPFIKARVIVIRWLVSFWLEPKPHTGPHIPGMEGEVLPKNIQRAAASLVSREESKNDNADKTDRTTEPEQSHSNTSTLTEREPSSSSLCSIDEEHLTDIEIVRRVFSSKRSNVNFVTEIFRQAFLLPICEAAAMRKVVKVYQEWIQQEEKPLFMQEPEEIVITSSDLPCIENVTDHDISMEEGEKREEENGTNTADHVRNSSWAKNGSYQGALHNASEEATEQNIRAGTQAVLQVFIINSSNIFLLEPANEIKNLLDEHTDMCKRILNIYRYMVVQVSMDKKTWEQMLLVLLRVTESVLKMPSQAFLQFQGKKNMTLAGRLAGPLFQTLIVAWIKANLNVYISRELWDDLLSVLSSLTYWEELATEWSLTMETLTKVLARNLYSLDLSDLPLDKLSEQKQKKHKGKGVGHEFQKVSVDKSFSRGWSRDQPGQAPMRQRSATTTGSPGTEKARSIVRQKTVDIDDAQILPRSTRVRHFSQSEETGNEVFGALNEEQPLPRSSSTSDILEPFTVERAKVNKEDMSQKLPPLNSDIGGSSANVPDLMDEFIAERLRSGNASTMTRRGSSPGSLEIPKDLPDILNKQNQMRPIDDPGVPSEWTSPASAGSSDLISSDSHSDSFSAFQYDGRKFDNFGFGTDTGVTSSADVDSGSGHHQSAEEQEVASLTTLHIDSETSSLNQQAFSAEVATITGSESASPVHSPLGSRSQTPSPSTLNIDHMEQKDLQLDEKLHHSVLQTPDDLEISEFPSECCSVMAGGTLTGWHADVATVMWRRMLGILGDVNSIMDPEIHAQVFDYLCELWQNLAKIRDNLGISTDNLTSPSPPVLIPPLRILTPWLFKATMLTDKYKQGKLHAYKLICNTMKRRQDVSPNRDFLTHFYNIMHCGLLHIDQDIVNTIIKHCSPQFFSLGLPGATMLIMDFIVAAGRVASSAFLNAPRVEAQVLLGSLVCFPNLYCELPSLHPNIPDVAVSQFTDVKELIIKTVLSSARDEPSGPARCVALCSLGIWICEELVHESHHPQIKEALNVICVSLKFTNKTVAHVACNMLHMLVHYVPRLQIYQPDSPLKIIQILIATITHLLPSTEASSYEMDKRLVVSLLLCLLDWIMALPLKTLLQPFHATGAESDKTEKSVLNCIYKVLHGCVYGAQCFSNPRYFPMSLSDLASVDYDPFMHLESLKEPEPLHSPDSERSSKLQPVTEVKTQMQHGLISIAARTVITHLVNHLGHYPMSGGPAMLTSQVCENHDNHYSESTELSPELFESPNIQFFVLNNTTLVSCIQIRSEENMPGGGLSAGLASANSNVRIIVRDLSGKYSWDSAILYGPPPVSGLSEPTSFMLSLSHQEKPEEPPTSNECLEDITVKDGLSLQFKRFRETVPTWDTIRDEEDVLDELLQYLGVTSPECLQRTGISLNIPAPQPVCISEKQENDVINAILKQHTEEKEFVEKHFNDLNMKAVEQDEPIPQKPQSAFYYCRLLLSILGMNSWDKRRSFHLLKKNEKLLRELRNLDSRQCRETHKIAVFYVAEGQEDKHSILTNTGGSQAYEDFVAGLGWEVNLTNHCGFMGGLQKNKSTGLTTPYFATSTVEVIFHVSTRMPSDSDDSLTKKLRHLGNDEVHIVWSEHTRDYRRGIIPTEFGDVLIVIYPMKNHMFSIQIMKKPEVPFFGPLFDGAIVNGKVLPIMVRATAINASRALKSLIPLYQNFLFSLKLCYSNVQYLLQSRKAKTKWNGIDELIGSANAVAFRYNKTL

SEQ ID NO: 463 - protein, 861 aa, Homo sapien
MFSCLIPGFSAPQSEHGPRTLDNLINPPLNLQETQVTIEEITPLVPPQSGDKGQEDLTSYFLEALLKYIVIQVKSLEWKNKENQERGFSFLFSHFKKYYLPYIFPNICKENSLYHPILDIPQMRPKPHYVVIKKDAETNEAIYCTKEPFIKARVIVIRWLVSFWLEPKPHTGPHIPGMEGEVLPKNIQRAAASLVSREESKNDNADKTDRTTEPEQSHSNTSTLTEREPSSSSLCSIDEEHLTDIEIVRRVFSSKRSNVNFVTEIFRQAFLLPICEAAAMRKVVKVYQEWIQQEEKPLFMQEPEEIVITSSDLPCIENVTDHDISMEEGEKREEENGTNTADHVRNSSWAKNGSYQGALHNASEEATEQNIRAGTQAVLQVFIINSSNIFLLEPANEIKNLLDEHTDMCKRILNIYRYMVVQVSMDKKTWEQMLLVLLRVTESVLKMPSQAFLQFQGKKNMTLAGRLAGPLFQTLIVAWIKANLNVYISRELWDDLLSVLSSLTYWEELATEWSLTMETLTKVLARNLYSLDLSDLPLDKLSEQKQKKHKGKGVGHEFQKVSVDKSFSRGWSRDQPGQAPMRQRSATTTGSPGTEKARSIVRQKTVDIDDAQILPRSTRVRHFSQSEETGNEVFGALNEEQPLPRSSSTSDILEPFTVERAKGAVPVIDSSSRHAPSLQSSTEASSITRSTESHITDTHSRESSLEVGDSIYDHLCHLIGPVELADSAFEQIQYIDLEGDDDLLSTLKEYFKENQENHSKNETGKDPASQEVTIAVNRGERLSLDKLECTDQETESENITSFVGTPENLQFQKEPNSAVFMSNIAPNQSDSFFRTQTSEKSKQLNTDKQPSEPSLDSPCDK

SEQ ID NO: 464 - protein, 430 aa, Homo sapien
MFSCLIPGFSAPQSEHGPRTLDNLINPPLNLQETQVTIEEITPLVPPQSGDKGQEDLTSYFLEALLKYIVIQVKSLEWKNKENQERGFSFLFSHFKKYYLPYIFPNICKENSLYHPILDIPQMRPKPHYVVIKKDAETNEAIYCTKEPFIKARVIVIRWLVSFWLEPKPHTGPHIPGMEGEVLPKNIQRAAASLVSREESKNDNADKTDRTTEPEQSHSNTSTLTEREPSSSSLCSIDEEHLTDIEIVRRVFSSKRSNVNFVTEIFRQAFLLPICEAAAMRKVVKVYQEWIQQEEKPLFMQEPEEIVITSSDLPCIENVTDHDISMEEGEKREEENGTNTADHVRNSSWAKNGSYQGALHNASEEATEQNIRAGTQAVLQVFIINSSNIFLLEPANEIKNLLDEHTDMCKRILNIYRYMVVQVSMDKKTW

SEQ ID NO: 465 - protein, 417 aa, Homo sapien
MFSCLIPGFSAPQSEHGPRTLDNLINPPLNLQETQVTIEEITPLVPPQSGDKGQEDLTSYFLEALLKYIVIQVKSLEWKNKENQERGFSFLFSHFKKYYLPYIFPNICKENSLYHPILDIPQMRPKPHYVVIKKDAETNEAIYCTKEPFIKARVIVIRWLVSFWLEPKPHTGPHIPGMEGEVLPKNIQRAAASLVSREESKNDNADKTDRTTEPEQSHSNTSTLTEREPSSSSLCSIDEEHLTDIEIVRRVFSSKRSNVNFVTEIFRQAFLLPICEAAAMRKVVKVYQEWIQQEEKPLFMQEPEEIVITSSDLPCIENVTDHDISMEEGEKREEENGTNTADHVRNSSWAKNGSYQGALHNASEEATEQNIRAGTQAVLQVDHFMAIFKNKIIIKYFCSVFQYTVYFSQYNKFTTYI

SEQ ID NO: 466 - protein, 76 aa, Homo sapien
MNRFKEGFKNSWITHPPWTIIGSQRSGAYHKAHRAASMKNASTNGCPLSETEYWARRDPIPANGAFLRLSRHKTSH

SEQ ID NO: 467 - protein, 198 aa, Homo sapien [sequence omitted]

SEQ ID NO: 468 - protein, 266 aa, Homo sapien
  MISC_FEATURE (18)..(18): x= any amino acid
MIQVGCRLTEDPWDLLTXARFCQCIPAELRQDALCALSRTSVLRIGNLHITGVLRSSIQWGIVSNEEGRPEHHVLKLRSQHGFLSILYSIGSKPLQIWDKKVRNGHIKRITDNDIQSLVLEIEGTNVSTTYITCPADPKKTLGIKLPFLVMIIKNLKKYFTFEVQVLDDKNVRRRFRASNYQSTTRVKPFICTMPMRLDDGWNQIQFNLLDFTRRAYGTNYIETLRVQIHANCRIRRVYFSDRLYSEDELPAEFKLYLPVQNKAKQ

SEQ ID NO: 469 - protein, 250 aa, Homo sapien [sequence omitted]

SEQ ID NO: 470 - protein, 88 aa, Homo sapien
MQIVASDGFTSQTDSTQKMSCRQSSNCISQFRTRQSNNWNCDSRDRPLDVTLLFKRKLCGGRCKNIFILVCSAVVLLFILGVACHGHR

SEQ ID NO: 471 - protein, 173 aa, Homo sapien
MFKNTFQSGFLSILYSIGSKPLQIWDKKVRNGHIKRITDNDIQSLVLEIEGTNVSTTYITCPADPKKTLGIKLPFLVMIIKNLKKYFTFEVQVLDDKNVRRRFRASNYQSTTRVKPFICTMPMRLDDGWNQIQFNLLDFTRRAYGTNYIETLRVQVLLLSQIEPWVGDRAHCV

SEQ ID NO: 472 - protein, 110 aa, Homo sapien
MATSKESLIVLDDKNVRRRFRASNYQSTTRVKPFICTMPMRLDDGWNQIQFNLLDFTRRAYGTNYIETLRVQIHANCRIRRVYFSDRLYSEDELPAEFKLYLPVQNKAKQ

SEQ ID NO: 473 - protein, 25 aa, Homo sapien
MRLNTFYTTYQKPQKSYGNNGMNTQ

SEQ ID NO: 474 - protein, 50 aa, Homo sapien
MCFCFPQEENHVDSQFTMSQPVCKIFYIMGKFIVTQKFSVFSLSYQKLQM

SEQ ID NO: 475 - protein, 90 aa, Homo sapien
MLKYFLSVWWSLEVNSHARRRHQKAWGSSDRVGACWLTGGLHRRVIRLENFLRIPRTESLTSFFFSFFFVFRSVAQAEVSLKSAFKALLR

SEQ ID NO: 476 - protein, 57 aa, Homo sapien [sequence omitted]

SEQ ID NO: 477 - protein, 66 aa, Homo sapien
MLQGQLSLHRNKTTIAFQGHQSFLQNENKVSPAYLNSPNTLGDLILISSVFHSDKSIQSLVNFYSA

SEQ ID NO: 478 - protein, 16 aa, Homo sapien
MFGEVFRVQIIFIFEL

SEQ ID NO: 479 - protein, 152 aa, Homo sapien
MWPTGPGPSVRKEQARPPARRNHQVGHLPYRHPEVPVDIKTSAPSEAPGLRSGQRGGRGQGEGAAKERRTARGGQGASLPRQGPPQPSRRLDRGIVLRRRPSSGPAPAPPRACYWRKVPGRAATGRHAAGPAPFPTSSKAAPALGLRGRRSG

SEQ ID NO: 480 - protein, 365 aa, Homo sapien
MWPTGPGPSVRKEQARPPARRNHQVGHLPYRHPEVPVDIKTSAPSEAPGLRSGQRGGRGQGEGAAKERRTARGGQGASLPRQGPPQPSRRLDRGIVLRRRPSSGPAPAPPRACYWRKVPGRAATGRHAAGPAPFPTRSKAAPALGLRGRRSGRGLGGFAGAGGGESPDSPDAARRAMGFPAAALLCALCCGLLAPAARAGYSEERCSWRGSGLTQEPGSVGQLALACAEGAVEWLYPAGALRLTLGGPDPRARPGIACLRPVRPFAGAQVFAERAGGALELLLAEGPGPAGGRCVRWGPRERRALFLQATPHQDISRRVAAFRFELREDGRPELPPQAHGLGVDGACRPCSDAELLLAACTSDFG

SEQ ID NO: 481 - protein, 332 aa, Homo sapien
MGFPAAALLCALCCGLLAPAARAGYSEERCSWRGSGLTQEPGSVGQLALACAEGAVEWLYPAGALRLTLGGPDPRARPGIACLRPVRPFAGAQVFAERAGGALELLLAEGPGPAGGRCVRWGPRERRALFLQATPHQDISRRVAAFRFELREDGRPELPPQAHGLGVDGACRPCSDAELLLAACTSDFGEGGAHCFGGDGTINKNSVHAKKKKKKKKKKKKKKKKGGRKKNTPEGGPKKSENPNVCMVHKEGDDQKERNGNIKANGRKERTVTTHRSKSEKKVHKQEETIGERNTNNGGGERNANKSTKTKYYSTKKENYMKTRIEGGRKNI

SEQ ID NO: 482 - protein, 84 aa, Homo sapien
MQGRLLPLPDISFWACSFSPTFSLTSFKSYEVPFKTSYSLKPSLYQFDLASIGTEKSGNERCDCKLIWQKEEDSCVQKSLWLTE

SEQ ID NO: 483 - protein, 46 aa, Homo sapien
MCTTVMGPELGPLWGEWTLSWGSHLWDTKKLSSEHDVLTRYVKKSK

SEQ ID NO: 484 - protein, 65 aa, Homo sapien
CINFDFLTYRVKTSCSLLSFLVSHKWDPQLSVHSPHSGPSSGPMTVVHIAKEQHGSGPQTLPQPC

SEQ ID NO: 485 - protein, 54 aa, Homo sapien
MSHSEILISLQRARKKLPTLHPIFSVCVKSPVKQDIAAQFRNVKHVTMIQELPI

SEQ ID NO: 486 - protein, 40 aa, Homo sapien
MPTNQLLVAPVNTPCFPLERLLYCIWCQCLRKQQYQPPLH

SEQ ID NO: 487 - protein, 50 aa, Homo sapien
MVVKHFKDTSILGLCSPESSLHIFPTIQPHQEMITAQKVYQYLPKLMDLK

SEQ ID NO: 488 - protein, 60 aa, Homo sapien
MKVCFAAATAHLLRPLQQRLSTILGKLGGAKVHGSSGTSHTRICLMEVTQGGRNEQFILH

SEQ ID NO: 489 - protein, 67 aa, Homo sapien [sequence omitted]

SEQ ID NO: 490 - protein, 19 aa, Homo sapien
MFFKLLSNECTVKSKINQV

SEQ ID NO: 491 - protein, 26 aa, Homo sapien
MTAYSSTLKTSTFFFLGLSELTRTNQ

SEQ ID NO: 492 - protein, 156 aa, Homo sapien [sequence omitted]

SEQ ID NO: 493 - protein, 156 aa, Homo sapien [sequence omitted]

SEQ ID NO: 494 - protein, 39 aa, Homo sapien
MQRQVGRTGLLWSSVSLLPWPLLPLCSGLLGRGLLSKAG

SEQ ID NO: 495 - protein, 43 aa, Homo sapien
MTNYYSTGILFLIDFPKKLHVCVFFSVIHLSHKMKSACSHLPQ

SEQ ID NO: 496 - protein, 94 aa, Homo sapien
MQKRPQIESRCLGPLLPQGLLPTEGPMDHFPLNASTRTAWVADIDGDAQSSWPRWGTEPQAVARQPLRPRFRKVPLLPRRNVRERPGGWAMLVV

SEQ ID NO: 497 - protein, 62 aa, Homo sapien [sequence omitted]

SEQ ID NO: 498 - protein, 43 aa, Homo sapien
LDSQPHLWSPRPLSHRRCYGSLNERTRDSVHHVALDLALVLRL

SEQ ID NO: 499 - protein, 100 aa, Homo sapien
MEHNYQQGVGMEKLKLPMFFQSNNNPSLAISWTLNVSKYNMKKKNLSHHAQPTPWCIDLLSASGNGCGHNVVSWESSCIQGIVMRERLVNRIGVHLPWHS

SEQ ID NO: 500 - protein, 54 aa, Homo sapien [sequence omitted]

SEQ ID NO: 501 - protein, 11 aa, Homo sapien
MVFFITFIVFL

SEQ ID NO: 502 - protein, 126 aa, Homo sapien [sequence omitted]

SEQ ID NO: 503 - protein, 126 aa, Homo sapien [sequence omitted]

SEQ ID NO: 504 - protein, 10 aa, Homo sapien
MGLFLVEKVL

SEQ ID NO: 505 - protein, 141 aa, Homo sapien [sequence omitted]

SEQ ID NO: 506 - protein, 141 aa, Homo sapien [sequence omitted]

SEQ ID NO: 507 - protein, 86 aa, Homo sapien [sequence omitted]

SEQ ID NO: 508 - protein, 32 aa, Homo sapien
MKYLADGSLLKPDELESSDFNCLWVLRVKSLR

SEQ ID NO: 509 - protein, 33 aa, Homo sapien
MKYLADGSLLKPDELESSDFVCLFSDRVTNHSG

SEQ ID NO: 510 - protein, 42 aa, Homo sapien
MVPQQTGLGIGRHTAMICHLKHLWSDSVGKLLTFLKNVLTFK

SEQ ID NO: 511 - protein, 47 aa, Homo sapien
MHLKLSLRHQQLLWAKRNCPDRKKHFWVLVKHCLNIWILLFSLLLQE

SEQ ID NO: 512 - protein, 30 aa, Homo sapien
MKKSFCTYTNVEYYVAVLNFKNQMQKISVY

SEQ ID NO: 513 - protein, 21 aa, Homo sapien
MFQRFSPVFSSKSLMGLFFFF

SEQ ID NO: 514 - protein, 144 aa, Homo sapien
MLIPKSPPGALSDHKSPTSSPPAATWKPAFPPAQHLQASPGQPAQVHVLPFPPDPTSSPPRQSPIPGQSRRQLRPCKWLKDPVWCHGLDWSRSQTVISNPKLGNFMPLFSPEPALTATPCGVLGPWPFTLSQEGPCCRPWPSGS

SEQ ID NO: 515 - protein, 966 aa, Homo sapien
MAPRARSASQDRLEEVAAPRPWPCSTSQDALSQLGQEGWHRARSDDYLSRATRSAEALGPGALVSPRFERCGWASQRSSARTPACPTRDLPGPQAPTPSGLQGLDDLGYIGYRSYSPSFQRRTGLLHALSFRDSPFGGLPTFNLAQSPASFPPEASEPPRVVRPEPSTRALEPPAEDRGDEVVLRQKPPTGRKVQLTPARQMNLGFGDESPEPEASGRGERLGRKVAPLATTEDSLASIPFIDEPTSPSIDLQAKHVPASAVVSSAMNSAPVLGTSPSSPTFTFTLGRHYSQDCSSIKAGRRSSYLLAITTERSKSCDDGLNTFRDEGRVLRRLPNRIPSLRMLRSFFTDGSLDSWGTSEDADAPSKRHSTSDLSDATFSDIRREGWLYYKQILTKKGKKAGSGLRQWKRVYAALRARSLSLSKERREPGPAAAGAAAAGAGEDEAAPVCIGSCLVDISYSETKRRHVFRLTTADFCEYLFQAEDRDDMLGWIRAIRENSRAEGEDPGCANQALISKKLNDYRKVSHSSGPKADSSPKGSRGLGGLKSEFLKQSAARGLRTQDLPAGSKDDSAAAPKTPWGINIIKKNKKAAPRAFGVRLEECQPATENQRVPLIVAACCRIVEARGLESTGIYRVPGNNAVVSSLQEQLNRGPGDINLQDERWQDLNVISSLLKSFFRKLPEPLFTDDKYNDFIEANRIEDARERMRTLRKLIRDLPGHYYETLKFLVGHLKTIADHSEKNKMEPRNLALVFGPTLVRTSEDNMTDMVTHMPDRYKIVETLIQHSDWFFSDEEDKGERTPVGDKEPQAVPNIEYLLPNIGRTVPPGDPGSADLLEIVKDSTTCSSAKSKGSWAPKKEPYAREMLAISFISAVNRKRKKRREARGLGSSTDDDSEQEAHKPGAGATAPGTQERPPGSRGPAAAADAPRRRHRGPRTRQSPGGAGGAAGRGDALHCVGLIQPVTMDR

SEQ ID NO: 516 - protein, 202 aa, Homo sapien
DLPGPFYERSNSLWDPFSDLRLPFISSCGAAATLSRSFSSPKNKKAAPRAFGVRLEECQPATENQRVPLIVAACCRIVEARGLESTGIYRVPGNNAVVSSLQEQLNRGPGDINLQDERWQDLNVISSLLKSFFRKLPEPLFTDDKYNDFIEANRIEDARERMRTLRKLIRDLPGHYYETLKFLVGPFLRQRLPFISSCGDAA

SEQ ID NO: 517 - protein, 103 aa, Homo sapien
MLAISFISAVNRKRKKRREARGLGSSTDDDSEQEAHKPGAGATAPGTQERPPGSRGPAAAADAPRRRHRGPRTRQSPGGAGGAAGRGDALHCVGLIQPVTMDR

SEQ ID NO: 518 - protein, 958 aa, Homo sapien
MAPRARSASQDRLEEVAAPRPWPCSTSQDALSQLGQEGWHRARSDDYLSRATRSAEALGPGALVSPRFERCGWASQRSSARTPACPTRDLPGPQAPTPSGLQGLDDLGYIGYRSYSPSFQRRTGLLHALSFRDSPFGGLPTFNLAQSPASFPPEASEPPRVVRPEPSTRALEPPAEDRGDEVVLRQKPPTGRKVQLTPARQMNLGFGDESPEPEASGRGERLGRKVAPLATTEDSLASIPFIDEPTSPSIDLQAKHVPASAVVSSAMNSAPVLGTSPSSPTFTFTLGRHYSQDCSSIKAGRRSSYLLAITTERSKSCDDGLNTFRDEGRVLRRLPNRIPSLRMLRSFFTDGSLDSWGTSEDADAPSKRHSTSDLSDATFSDIRREGWLYYKQILTKKGKKAGSGLRQWKRVYAALRARSLSLSKERREPGPAAAGAAAAGAGEDEAAPVCIGSCLVDISYSETKRRHVFRLTTADFCEYLFQAEDRDDMLGWIRAIRENSRAEGEDPGCANQALISKKLNDYRKVSHSSGPKADSSPKGSRGLGGLKSEFLKQSAARGLRTQDLPAGSKDDSAAAPKTPWGINIIKKNKKAAPRAFGVRLEECQPATENQRVPLIVAACCRIVEARGLESTGIYRVPGNNAVVSSLQEQLNRGPGDINLQDERWQDLNVISSLLKSFFRKLPEPLFTDDKYNDFIEANRIEDARERMRTLRKLIRDLPGHYYETLKFLVGHLKTIADHSEKNKMEPRNLALVFGPTLVRTSEDNMTDMVTHMPDRYKIVETLIQHSDWFFSDEEDKGERTPVGDKEPQAVPNIEYLLPNIGRTVPPGDPGSDSTTCSSAKSKGSWAPKKEPYAREMLAISFISAVNRKRKKRREARGLGSSTDDDSEQEAHKPGAGATAPGTQERPPGSRGPAAAADAPRRRHRGPRTRQSPGGAGGAAGRGDALHCVGLIQPVTMDR

SEQ ID NO: 519 - protein, 837 aa, Homo sapien
MAPRARSASQDRLEEVAAPRPWPCSTSQDALSQLGQEGWHRARSDDYLSRATRSAEALGPGALVSPRFERCGWASQRSSARTPACPTRDLPGPQAPTPSGLQGLDDLGYIGYRSYSPSFQRRTGLLHALSFRDSPFGGLPTFNLAQSPASFPPEASEPPRVVRPEPSTRALEPPAEDRGDEVVLRQKPPTGRKVQLTPARQMNLGFGDESPEPEASGRGERLGRKVAPLATTEDSLASIPFIDEPTSPSIDLQAKHVPASAVVSSAMNSAPVLGTSPSSPTFTFTLGRHYSQDCSSIKAGRRSSYLLAITTERSKSCDDGLNTFRDEGRVLRRLPNRIPSLRMLRSFFTDGSLDSWGTSEDADAPSKRHSTSDLSDATFSDIRREGWLYYKQILTKKGKKAGSGLRQWKRVYAALRARSLSLSKERREPGPAAAGAAAAGAGEDEAAPVCIGSCLVDISYSETKRRHVFRLTTADFCEYLFQAEDRDDMLGWIRAIRENSRAEGEDPGCANQALISKKLNDYRKVSHSSGPKADSSPKGSRGLGGLKSEFLKQSAARGLRTQDLPAGSKDDSAAAPKTPWGINIIKKNKKAAPRAFGVRLEECQPATENQRVPLIVAACCRIVEARGLESTGIYRVPGNNAVVSSLQEQLNRGPGDINLQDERWQDLNVISSLLKSFFRKLPEPLFTDDKYNDFIEANRIEDARERMRTLRKLIRDLPGHYYETLKFLVGHLKTIADHSEKNKMEPRNLALVFGPTLVRTSEDNMTDMVTHMPDRYKIVETLIQHSDWFFSDEEDKGERTPVGDKEPQAVPNIEYLLPNIGRTVPPGDPGSADLLEI

SEQ ID NO: 520 - protein, 470 aa, Homo sapien
MLGWIRAIRENSRAEGEDPGCANQALISKKLNDYRKVSHSSGPKADSSPKGSRGLGGLKSEFLKQSAARGLRTQDLPAGSKDDSAAAPKTPWGINIIKKNKKAAPRAFGVRLEECQPATENQRVPLIVAACCRIVEARGLESTGIYRVPGNNAVVSSLQEQLNRGPGDINLQDERWQDLNVISSLLKSFFRKLPEPLFTDDKYNDFIEANRIEDARERMRTLRKLIRDLPGHYYETLKFLVGHLKTIADHSEKNKMEPRNLALVFGPTLVRTSEDNMTDMVTHMPDRYKIVETLIQHSDWFFSDEEDKGERTPVGDKEPQAVPNIEYLLPNIGRTVPPGDPGSDSTTCSSAKSKGSWAPKKEPYAREMLAISFISAVNRKRKKRREARGLGSSTDDDSEQEAHKPGAGATAPGTQERPPGSRGPAAAADAPRRRHRGPRTRQSPGGAGGAAGRGDALHCVGLIQPVTMDR

SEQ ID NO: 521 - protein, 252 aa, Homo sapien
MRTLRKLIRDLPGHYYETLKFLVGHLKTIADHSEKNKMEPRNLALVFGPTLVRTSEDNMTDMVTHMPDRYKIVETLIQHSDWFFSDEEDKGERTPVGDKEPQAVPNIEYLLPNIGRTVPPGDPGSDSTTCSSAKSKGSWAPKKEPYAREMLAISFISAVNRKRKKRREARGLGSSTDDDSEQEAHKPGAGATAPGTQERPPGSRGPAAAADAPRRRHRGPRTRQSPGGAGGAAGRGDALHCVGLIQPVTMDR

SEQ ID NO: 522 - protein, 693 aa, Homo sapien
MAPRARSASQDRLEEVAAPRPWPCSTSQDALSQLGQEGWHRARSDDYLSRATRSAEALGPGALVSPRFERCGWASQRSSARTPACPTRDLPGPQAPTPSGLQGLDDLGYIGYRSYSPSFQRRTGLLHALSFRDSPFGGLPTFNLAQSPASFPPEASEPPRVVRPEPSTRALEPPAEDRGDEVVLRQKPPTGRKVQLTPARQMNLGFGDESPEPEASGRGERLGRKVAPLATTEDSLASIPFIDEPTSPSIDLQAKHVPASAVVSSAMNSAPVLGTSPSSPTFTFTLGRHYSQDCSSIKAGRRSSYLLAITTERSKSCDDGLNTFRDEGRVLRRLPNRIPSLRMLRSFFTDGSLDSWGTSEDADAPSKRHSTSDLSDATFSDIRREGWLYYKQILTKKGKKAGSGLRQWKRVYAALRARSLSLSKERREPGPAAAGAAAAGAGEDEAAPVCIGSCLVDISYSETKRRHVFRLTTADFCEYLFQAEDRDDMLGWIRAIRENSRAEGEDPGCANQALISKKLNDYRKVSHSSGPKADSSPKGSRGLGGLKSEFLKQSAARGLRTQDLPAGSKDDSAAAPKTPWGINIIKKNKKAAPRAFGVRLEECQPATENQRVPLIVAACCRIVEARGLESTGIYRVPGNNAVVSSLQEQLNRGPGDINLQDERWQDLNVISSLLKSFFRKLPEPLFTDGALLF

SEQ ID NO: 523 - protein, 697 aa, Homo sapien
MAPRARSASQDRLEEVAAPRPWPCSTSQDALSQLGQEGWHRARSDDYLSRATRSAEALGPGALVSPRFERCGWASQRSSARTPACPTRDLPGPQAPTPSGLQGLDDLGYIGYRSYSPSFQRRTGLLHALSFRDSPFGGLPTFNLAQSPASFPPEASEPPRVVRPEPSTRALEPPAEDRGDEVVLRQKPPTGRKVQLTPARQMNLGFGDESPEPEASGRGERLGRKVAPLATTEDSLASIPFIDEPTSPSIDLQAKHVPASAVVSSAMNSAPVLGTSPSSPTFTFTLGRHYSQDCSSIKAGRRSSYLLAITTERSKSCDDGLNTFRDEGRVLRRLPNRIPSLRMLRSFFTDGSLDSWGTSEDADAPSKRHSTSDLSDATFSDIRREGWLYYKQILTKKGKKAGSGLRQWKRVYAALRARSLSLSKERREPGPAAAGAAAAGAGEDEAAPVCIGSCLVDISYSETKRRHVFRLTTADFCEYLFQAEDRDDMLGWIRAIRENSRAEGEDPGCANQALISKKLNDYRKVSHSSGPKADSSPKGSRGLGGLKSEFLKQSAARGLRTQDLPAGSKDDSAAAPKTPWGINIIKKNKKAAPRAFGVRLEECQPATENQRVPLIVAACCRIVEARGLESTGIYRVPGNNAVVSSLQEQLNRGPGDINLQDEVGEAGGSVEGGLRWCVGGAPLGEFCGLLCCMHCAL

SEQ ID NO: 524 - protein, 252 aa, Homo sapien; identical to SEQ ID NO: 521

SEQ ID NO: 525 - protein, 568 aa, Homo sapien
MAPRARSASQDRLEEVAAPRPWPCSTSQDALSQLGQEGWHRARSDDYLSRATRSAEALGPGALVSPRFERCGWASQRSSARTPACPTRDLPGPQAPTPSGLQGLDDLGYIGYRSYSPSFQRRTGLLHALSFRDSPFGGLPTFNLAQSPASFPPEASEPPRVVRPEPSTRALEPPAEDRGDEVVLRQKPPTGRKVQLTPARQMNLGFGDESPEPEASGRGERLGRKVAPLATTEDSLASIPFIDEPTSPSIDLQAKHVPASAVVSSAMNSAPVLGTSPSSPTFTFTLGRHYSQDCSSIKAGRRSSYLLAITTERSKSCDDGLNTFRDEGRVLRRLPNRIPSLRMLRSFFTDGSLDSWGTSEDADAPSKRHSTSDLSDATFSDIRREGWLYYKQILTKKGKKAGSGLRQWKRVYAALRARSLSLSKERREPGPAAAGAAAAGAGEDEAAPVCIGSCLVDISYSETKRRHVFRLTTADFCEYLFQAEDRDDMLGWIRAIRENSRAEGEVRARPARQPQRAGGVASHRLWTWDARSEPHFPLLERGADRSAPRDCVPQGFGVRRVHRQGSRG

SEQ ID NO: 526 - protein, 260 aa, Homo sapien
MRTLRKLIRDLPGHYYETLKFLVGHLKTIADHSEKNKMEPRNLALVFGPTLVRTSEDNMTDMVTHMPDRYKIVETLIQHSDWFFSDEEDKGERTPVGDKEPQAVPNIEYLLPNIGRTVPPGDPGSADLLEDLKDSTTCSSAKSKGSWAPKKEPYAREMLAISFISAVNRKRKKRREARGLGSSTDDDSEQEAHKPGAGATAPGTQERPPGSRGPAAAADAPRRRHRGPRTRQSPGGAGGAAGRGDALHCVGLIQPVTMDR

SEQ ID NO: 527 - protein, 125 aa, Homo sapien
MLGWIRAIRENSRAEGEDPGCANQALISKKLNDYRKVSHSSGPKADSSPKGSRGLGGLKSEFLKQSAARGLRTQDLPAGSKDDSAAAPKTPWGINIIKKNKKAAPRAFGVRLEECQPATENQRVP

SEQ ID NO: 528 - protein, 225 aa, Homo sapien
  MISC_FEATURE (132)..(132): x= any amino acid
  MISC_FEATURE (140)..(140): x= any amino acid
  MISC_FEATURE (153)..(153): x= any amino acid
DLPGPFYERSNSLWDPFSDLRLPFISSCGAAATLSRSFSSPKNKKAAPRAFGVRLEECQPATENQRVPLIVAACCRIVEARGLESTGIYRVPGNNAVVSSLQEQLNRGPGDINLQDERHSATERVILLESRXALLYNGAXSLRCKCRSTHESXSLYQAVDDLRLITEHSIDGPSPHSDGLRVEQNEELRKLIRDLPGHYYETLKFLVGPFLRQRLPFISSCGAAA

SEQ ID NO: 529 - protein, 917 aa, Homo sapien
MAPRARSASQDRLEEVAAPRPWPCSTSQDALSQLGQEGWHRARSDDYLSRATRSAEALGPGALVSPRFERCGWASQRSSARTPACPTRDLPGPQAPTPSGLQGLDDLGYIGYRSYSPSFQRRTGLLHALSFRDSPFGGLPTFNLAQSPASFPPEASEPPRVVRPEPSTRALEPPAEDRGDEVVLRQKPPTGRKVQLTPARQMNLGFGDESPEPEASGRGERLGRKVAPLATTEDSLASIPFIDEPTSPSIDLQAKHVPASAVVSSAMNSAPVLGTSPSSPTFTFTLGRHYSQDCSSIKAGRRSSYLLAITTERSKSCDDGLNTFRDEGRVLRRLPNRIPSLRMLRSFFTDGSLDSWGTSEDADAPSKRHSTSDLSDATFSDIRREGWLYYKQILTKKGKKAGSGLRQWKRVYAALRARSLSLSKERREPGPAAAGAAGPAQAEDRDDMLGWIRAIRENSRAEGEDPGCANQALISKKLNDYRKVSHSSGPKADSSPKGSRGLGGLKSEFLKQSAARGLRTQDLPAGSKDDSAAAPKTPWGINIIKKNKKAAPRAFGVRLEECQPATENQRVPLIVAACCRIVEARGLESTGIYRVPGNNAVVSSLQEQLNRGPGDINLQDERWQDLNVISSLLKSFFRKLPEPLFTDDKYNDFIEANRIEDARERMRTLRKLIRDLPGHYYETLKFLVGHLKTIADHSEKNKMEPRNLALVFGPTLVRTSEDNMTDMVTHMPDRYKIVETLIQHSDWFFSDEEDKGERTPVGDKEPQAVPNIEYLLPNIGRTVPPGDPGSDSTTCSSAKSKGSWAPKKEPYAREMLAISFISAVNRKRKKRREARGLGSSTDDDSEQEAHKPGAGATAPGTQERPPGSRGPAAAADAPRRRHRGPRTRQSPGGAGGAAGRGDALHCVGLIQPVTMDR

SEQ ID NO: 530 - protein, 851 aa, Homo sapien
MAPRARSASQDRLEEVAAPRPWPCSTSQDALSQLGQEGWHRARSDDYLSRATRSAEALGPGALVSPRFERCGWASQRSSARTPACPTRDLPGPQAPTPSGLQGLDDLGYIGYRSYSPSFQRRTGLLHALSFRDSPFGGLPTFNLAQSPASFPPEASEPPRVVRPEPSTRALEPPAEDRGDEVVLRQKPPTGRKVQLTPARQMNLGFGDESPEPEASGRGERLGRKVAPLATTEDSLASIPFIDEPTSPSIDLQAKHVPASAVVSSAMNSAPVLGTSPSSPTFTFTLGRHYSQDCSSIKAGRRSSYLLAITTERSKSCDDGLNTFRDEGRVLRRLPNRIPSLRMLRSFFTDGSLDSWGTSEDADAPSKRHSTSDLSDATFSDIRREGWLYYKQILTKKGKKAGSGLRQWKRVYAALRARSLSLSKERREPGPAAAGAAAAGAGEDEAAPVCIGSCLVDISYSETKRRHVFRLTTADFCEYLFQAEDRDDMLGWIRAIRENSRAEGEDPGCANQALISKKLNDYRKVSHSSGPKADSSPKGSRGLGGLKSEFLKQSAARGLRTQDLPAGSKDDSAAAPKTPWGINIIKKNKKAAPRAFGVRLEECQPATENQRVPLIVAACCRIVEARGLESTGIYRVPGNNAVVSSLQEQLNRGPGDINLQDERWQDLNVISSLLKSFFRKLPEPLFTDDKYNDFIEANRIEDARERMRTLRKLIRDLPGHYYETLKFLVGHLKTIADHSEKNKMEPRNLALVFGPTLVRTSEDNMTDMVTHMPDRYKIVETLIQHSDWFFSDEEDKGERTPVGDKEPQAVPNIEYLLPNIGRTVPPGDPGSDSTTCSSAKSKVRMKAILKA

SEQ ID NO: 531 - protein, 926 aa, Homo sapien
MAPRARSASQDRLEEVAAPRPWPCSTSQDALSQLGQEGWHRARSDDYLSRATRSAEALGPGALVSPRFERCGWASQRSSARTPACPTRDLPGPQAPTPSGLQGLDDLGYIGYRSYSPSFQRRTGLLHALSFRDSPFGGLPTFNLAQSPASFPPEASEPPRVVRPEPSTRALEPPAEDRGDEVVLRQKPPTGRKVQLTPARQMNLGFGDESPEPEASGRGERLGRKVAPLATTEDSLASIPFIDEPTSPSIDLQAKHVPASAVVSSAMNSAPVLGTSPSSPTFTFTLGRHYSQDCSSIKAGRRSSYLLAITTERSKSCDDGLNTFRDEGRVLRRLPNRIPSLRMLRSFFTDGSLDSWGTSEDADAPSKRHSTSDLSDATFSDIRREGWLYYKQILTKKGKKAGSGLRQWKRVYAALRARSLSLSKERREPGPAAAGAAAAGAGEDEAAPVCIGSCLVDISYSETKRRHVFRLTTADFCEYLFQAEDRDDMLGWIRAIRENSRAEGEDPGCANQALISKKLNDYRKVSHSSGPKADSSPKGSRGLGGLKSEFLKQSAARGLRTQDLPAGSKDDSAAAPKTPWGINIIKKNKKAAPRAFGVRLEECQPATENQRVPLIVAACCRIVEARGLESTGIYRVPGNNAVVSSLQEQLNRGPGDINLQDERWQDLNVISSLLKSFFRKLPEPLFTDDKYNDFIEANRIEDARERMRTLRKLIRDLPGHYYETLKFLVGHLKTIADHSEKNKMEPRNLALVFGPTLVRTSEDNMTDMVTHMPDRYKIVETLIQHSDWFFSDEEDKGERILPPVVQPSPRVRGPPRRSRTPGRCWRSPSSRPSTASARSGGRRGGWAAAPTTTRSRRRTSLGRGPQRRGLRSGRRGAEARRRRPLPRAAATAAPGPGSPPAAREGPPAAATRSIVSGYIQPVTMDR

SEQ ID NO: 532 - protein, 1011 aa, Homo sapien
MAPRARSASQDRLEEVAAPRPWPCSTSQDALSQLGQEGWHRARSDDYLSRATRSAEALGPGALVSPRFERCGWASQRSSARTPACPTRDLPGPQAPTPSGLQGLDDLGYIGYRSYSPSFQRRTGLLHALSFRDSPFGGLPTFNLAQSPASFPPEASEPPRVVRPEPSTRALEPPAEDRGDEVVLRQKPPTGRKVQLTPARQMNLGFGDESPEPEASGRGERLGRKVAPLATTEDSLASIPFIDEPTSPSIDLQAKHVPASAVVSSAMNSAPVLGTSPSSPTFTFTLGRHYSQDCSSIKAGRRSSYLLAITTERSKSCDDGLNTFRDEGRVLRRLPNRIPSLRMLRSFFTDGSLDSWGTSEDADAPSKRHSTSDLSDATFSDIRREGWLYYKQILTKKGKKAGSGLRQWKRVYAALRARSLSLSKERREPGPAAAGAAAAGAGEDEAAPVCIGSCLVDISYSETKRRHVFRLTTADFCEYLFQAEDRDDMLGWIRAIRENSRAEGEDPGCANQALISKKLNDYRKVSHSSGPKADSSPKGSRGLGGLKSEFLKQSAARGLRTQDLPAGSKDDSAAAPKTPWGINIIKKNKKAAPRAFGVRLEECQPATENQRVPLIVAACCRIVEARGLESTGIYRVPGNNAVVSSLQEQLNRGPGDINLQDERWQDLNVISSLLKSFFRKLPEPLFTDGALLFYLLNLGVHVLETGAGTPFLGSACSSDGIASQMNTAGLPQVRCTPECSCDKYNDFIEANRIEDARERMRTLRKLIRDLPGHYYETLKFLVGHLKTIADHSEKNKMEPRNLALVFGPTLVRTSEDNMTDMVTHMPDRYKIVETLIQHSDWFFSDEEDKGERTPVGDKEPQAVPNIEYLLPNIGRTVPPGDPGSDSTTCSSAKSKGSWAPKKEPYAREMLAISFISAVNRKRKKRREARGLGSSTDDDSEQEAHKPGAGATAPGTQERPPGSRGPAAAADAPRRRHRGPRTRQSPGGAGGAAGRGDALHCVGLIQPVTMDR

SEQ ID NO: 533 - protein, 324 aa, Homo sapien
MVPFSSDLLNLGVHVLETGAGTPFLGSACSSDGIASQMNTAGLPQVRCTPECSCDKYNDFIEANRIEDARERMRTLRKLIRDLPGHYYETLKFLVGHLKTIADHSEKNKMEPRNLALVFGPTLVRTSEDNMTDMVTHMPDRYKIVETLIQHSDWFFSDEEDKGERTPVGDKEPQAVPNIEYLLPNIGRTVPPGDPGSDSTTCSSAKSKGSWAPKKEPYAREMLAISFISAVNRKRKKRREARGLGSSTDDDSEQEAHKPGAGATAPGTQERPPGSRGPAAAADAPRRRHRGPRTRQSPGGAGGAAGRGDALHCVGLIQPVTMDR

SEQ ID NO: 534 - protein, 269 aa, Homo sapien
MMRPWVTGLGLGLDERLGAVTWRGRTGDRRRGRQRGRVRDAPRILDLSPTQGSWAPKKEPYAREMLAISFISAVNRKRKKRREARGLGSSTDDDSEQEAHKPGAGATAPGTQERPLGPLPGAVAPEAPGRLSPPAAPEERPAADTRSIVSGYSTLSTMDRSVCSGASGRRAGAGDEADDERSELSHVETDTEGAAGAGPGGRLTRRPSFSSHHLMPCDTLARRRLARGRPDGEGAGRGGPRAPEPPGSASSSSQESLRPPAAALASRPS

SEQ ID NO: 535 - protein, 325 aa, Homo sapien
  MISC_FEATURE (42)..(42): x= any amino acid
  MISC_FEATURE (44)..(44): x= any amino acid
  MISC_FEATURE (64)..(64): x= any amino acid
MESWNWVLVFGCILVRMSEDNMIDMVTYMLDCYKIVETLIQXLXWFFSDEEDKGERTLVGDKEXQAVPNIEYLLPNIWQDSAPWRPGVSGPVGDLKDSTTCSSAKSKGSWAPKKEPYAREMLAISFISAVNRKRKKRREARGLGSSTDDDSEQEAHKPGAGATAPGTQERPLGPLPGAVAPEAPGRLSPPAAPEERPAADTRSIVSGYSTLSTMDRSVCSGASGRRAGAGDEADDERSELSHVETDTEGAAGAGPGGRLTRRPSFSSHHLMPCDTLARRRLARGRPDGEGAGRGGPRAPEPPGSASSSSQESLRPPAAALASRPS

SEQ ID NO: 536 - protein, 51 aa, Homo sapien
MELSIVPVTYKTMSPLHIHFYLLLWKSAVNNDICTVEIFFKVLAPPPTLVV

SEQ ID NO: 537 - protein, 41 aa, Homo sapien
MNKTKFSLPNDFLSHLGDVTLASSLTPLSFIIHTNSLAGFT

SEQ ID NO: 538 - protein, 108 aa, Homo sapien
MAKLDKNPGLLTPTREPTPSTFAGRHVMDTTPEKQEPGVRLETCLRLAMRNAPGRHEWPYTFPPSPAPSFKVPIHVLAPIPLGSFGASHLHTRTHTVNWALLSPCPVH

SEQ ID NO: 539 - protein, 119 aa, Homo sapien
RAFLDFVCRTPAVPFPRHSPPEHTGRGGSPKTWPPLIPVLCVSPFEFLTSSSWVLFLLSPFLFLRKPQAASPRALVWPETEAPRLEGGAALGGPGQWKACYYLEWLLGPNTSWEAGWVK

SEQ ID NO: 540 - protein, 537 aa, Homo sapien
MESGLAGNGTGAGLVMKVKQEKPERLLQTLAPQAMLVEKDKENIFQQHRGLPPRQTMGRPRALGGQEESGSPRWAPPTEQDAGLAGRAPGSASGPLSPSLSSGEGHFVCLDCGKRFSWWSSLKIHQRTHTGEKPYLCGKCGKSFSQKPNLARHQRHHTGERPFCCPECARRFSQKQHLLKHQKTHSRPATHSCPECERCFRHQVGLRIHQRAHARDRQGSRAGLHELIQDAAARRACRLQPGPPRGRPEWAWLGLCQGWWGQPGARAAVSGPEGPGEPRQFICNECGKSFTWWSSLNIHQRIHTGERPYACPECGRRFSQKPNLTRHLRNHTGERPHPCPHCGRGFRQKQHLLKHLRTHLPGAQAAPCPSCGKSCRSRAALRAHQRAHAVAEPAVPAGEPGDQPQAEAIPGLAARPRSSQRSPGARDTLWGRGQAGLAGPGEPRQFICNECGKSFSWWSALTIHQRIHTGERPYPCPECGRRFSQKPNLTRHRRNHTGERPYLCPACGRGFSQKQHLLKHQRVHRAAPACSPKEEAR

SEQ ID NO: 541 - protein, 68 aa, Homo sapien
MESGLAGNGTGAGLVMKVKQEKPERLLQTLAPQAMLVEKDKENVLWTTLVFFFACGSFKLLVFKISTF

SEQ ID NO: 542 - protein, 550 aa, Homo sapien
MLDLMLEAVNNIKDAMPKMQIGAPVQAITLMSGERPCLQGYYTAAVIDSLSLTVHLRILNAPGASGNSIQDYTNLSVVRAKGNKDVGKSKHCFNAFASDRSSLHRDLGPDTRPPECIVLYNFKRCGKRFSWWSSLKIHQRTHTGEKPYLCGKCGKSFSQKPNLARHQRHHTGERPFCCPECARRFSQKQHLLKHQKTHSRPATHSCPECERCFRHQVGLRIHQRAHARDRQGSRAGLHELIQDAAARRACRLQPGPPRGRPEWAWLGLCQGWWGQPGARAAVSGPEGPGEPRQFICNECGKSFTWWSSLNIHQRIHTGERPYACPECGRRFSQKPNLTRHLRNHTGERPHPCPHCGRGFRQKQHLLKHLRTHLPGAQAAPCPSCGKSCRSRAALRAHQRAHAVAEPAVPAGEPGDQPQAEAIPGLAARPRSSQRSPGARDTLWGRGQAGLAGPGEPRQFICNECGKSFSWWSALTIHQRIHTGERPYPCPECGRRFSQKPNLTRHRRNHTGERPYLCPACGRGFSQKQHLLKHQRVHRAAPACSPKEEAR

SEQ ID NO: 543 - protein, 198 aa, Homo sapien [sequence omitted]

SEQ ID NO: 544 - protein, 20 aa, Homo sapien
MKLISFSLMLWLRVNALYLC

SEQ ID NO: 545 - protein, 52 aa, Homo sapien
MHCRQWENKYSMNVSEKRKKRGLFVYYSFKWKDQGHGMNYIFHILCISYLFL

SEQ ID NO: 546 - protein, 67 aa, Homo sapien
MLIKQAGVRMENASIRKRTHKCLASLHRVFPLLSSWSSPLGRNSPLGHVWALASSKLLYPSSGENSL

SEQ ID NO: 547 - protein, 118 aa, Homo sapien [sequence omitted]

SEQ ID NO: 548 - protein, 115 aa, Homo sapien [sequence omitted]

SEQ ID NO: 549 - protein, 63 aa, Homo sapien
MKESIVRHYSKKNFLTCLSWKSTKGHLSCLDMDYQYVCIQHTAYKVRGNNRQYILCTHNYSPP

SEQ ID NO: 550 - protein, 57 aa, Homo sapien
MLFGTIKYQIISKKPMVSWLCWCPSLTFVSSWGSRLAGCSSSLQDGSCGPLSHHTGL

SEQ ID NO: 551 - protein, 41 aa, Homo sapien
MSTFSSDLTSVSTCLLDIYIYLDMSCGYVPRQHIQKLTHYL

SEQ ID NO: 552 - protein, 92 aa, Homo sapien
MLYSFLNYLDISSIKLWPCVPLQGSSSEMTLISCCSMYQIHSLVYCLDVSTLCLGMICLTEMNYIYVPKSLSNFNSKYITSSSIGYLFHSAF

SEQ ID NO: 553 - protein, 67 aa, Homo sapien
MIFKRTFKISTHLTTILSRLCTHVLGKLQKNGRKKGPKSTKHRRHNSKNIQYYCSKLLNKCSLTENH

SEQ ID NO: 554 - protein, 57 aa, Homo sapien [sequence omitted]

SEQ ID NO: 555 - protein, 73 aa, Homo sapien
MSVGLMNHLKLFKSRAEASLKKEIAPFSSIFLSWVSVPSEPSWGIAICFLQLLSQSHSGIRKFLAINHLYMSY

SEQ ID NO: 556 - protein, 43 aa, Homo sapien
MSFPLIMKHSLKLFWYVIILLYSLYTVENKFSSGILVSSSFSP

SEQ ID NO: 557 - protein, 77 aa, Homo sapien [sequence omitted]

SEQ ID NO: 558 - protein, 61 aa, Homo sapien
MAGSWVAESPPLGAGRSECQPSALINLPNHLISLSLIVPICFNGEQPHVILPNLAESLRIS

SEQ ID NO: 559 - protein, 59 aa, Homo sapien
AAAGSGVRSRDAVVGAGQRRAPEAGAAGGRANVIFPNKLFPAESSLLAQNKQMKSSPER

SEQ ID NO: 560 - protein, 55 aa, Homo sapien
AAAGSGVRSRDAVVGAGQRRAPEAGAAGGRANVIFPNKLFPAESSLLAQNKQMKR

SEQ ID NO: 561 - protein, 72 aa, Homo sapien [sequence omitted]

SEQ ID NO: 562 - protein, 121 aa, Homo sapien
MTPPAFPLTIFSRDPPLLLGPKEERGRKFHTPSKARGHRRGGSRQAGARCPSLGASEGHTVARQPLLPLLPTWRPVAKAFVPGSEELAVLAATPVHGFPLASSPREFWLREGVREERKGTL

SEQ ID NO: 563 - protein, 57 aa, Homo sapien
MQLKVSQFIPRISHHLQAPYLDGSLACHFFFFSPNVTFSVRISLTSPFKIATSTSTL

SEQ ID NO: 564 - protein, 321 aa, Homo sapien
FVSLCSGSSSCRSLLFFFRFVLIRWSFPLLSSSFSSSLFVVLFRRCGLVRFSRSVLASVLLALLLLSSCVRFPVACLSFSLLLVICFSLFLLFLSPVSPSFLVSSSPFLLFACACLARSVFFCLCFCRVRLSLVFFGLLFLFSPLRSLLFSVLRASVPFVFFVFFASFRSLRSSSSVPLLSSFLPLSPFLLLWLPSLAVLPLRLPLLPSVVSRCCSCVLLCVLVLFWFLVGGCVVCALCVLFVVFVRSWCTAEKSHHQRTSFNRLIVGASPEGLRAGRSGGCSRLLFFAPWALSKRSRYLALEGTLAPPFFFCMSTFAFIE

SEQ ID NO: 565 - protein, 149 aa, Homo sapien [sequence omitted]

SEQ ID NO: 566 - protein, 387 aa, Homo sapien
MRSVSYVQRVALEFSGSLFPHAICLGDVDNDTLNELVVGDTSGKVSVYKNDDSRPWLTCSCQGMLTCVGVGDVCNKGKNLLVAVSAEGWFHLFDLTPAKVLDASGHHETLIGEEQRPVFKQHIPANTKVMLISDIDGDGCRELVVGYTDRVVRAFRWEELGEGPEHLTGQLVSLKKWMLEGQVDSLSVTLGPLGLPELMVSQPGCAYAILLCTWKKDTGSPPASEGPTDGSRETPAARDVVLHQTSGRIHNKNVSTHLIGNIKQGHGTESSGSGLFALCTLDGTLKLMEEMEEADKLLWSVQVDHQLFALEKLDVTGNGHEEVVACAWDGQTYIIDHNRTVVRFQVDENIRAFCAGDPRPHGPFLTTLKLDRRVRHAREVFAPHFPF

SEQ ID NO: 567 - protein, 31 aa, Homo sapien
EGGAEEQHGREPVSDKKTKTQKLNGKVRSLN

SEQ ID NO: 568 - protein, 178 aa, Homo sapien
MRSVSYVQRVALEFSGSLFPHAICLGDVDNDTLNELVVGDTSGKVSVYKNDDSRPWLTCSCQGMLTCVGVGDVCNKGKNLLVAVSAEGWFHLFDLTPAKVLDASGHHETLIGEEQRPVFKQHIPANTKVMLISDIVGMPTFAGSQESRSQWILEHIPRDWGERENPYSCMHLLCAELP

SEQ ID NO: 569 - protein, 90 aa, Homo sapien
MHQRLSKSYLRPQLLPRTQVVEIICRLNISTWFQQAPQIQHIQNRSFYFLSAKPTPVPEHISGNSAIRNSYFICSLYHLTLTPLIILSTH

SEQ ID NO: 570 - protein, 43 aa, Homo sapien
MVLFLIVYFLDNDSSEKFRPFVFFFNPAPSVKTMSYRMSCFWI

SEQ ID NO: 571 - protein, 55 aa, Homo sapien
MQLSKSSLFPSHLQLNTISQFLFLDTARNRPSYQSSHFLSVSFPNSFSQNLLQIS

SEQ ID NO: 572 - protein, 60 aa, Homo sapien
MLTELLFTIYFHIYKWEYSSSITFCNDHVITVGKYPYDKLESLCSIVCIRISLIFSISSQ

SEQ ID NO: 573 - protein, 51 aa, Homo sapien
MNCTQAIAEDGIVSYPYNLENSPWRQNPDLLRKLGLLDSRQRIVFPNYCFL

SEQ ID NO: 574 - protein, 56 aa, Homo sapien
MALLELLTSNFRFDSFYKQFFPLVCPMSRRPFPVRYLCMSHAICNSSCMDASAIHT

SEQ ID NO: 575 - protein, 728 aa, Homo sapien
MATPGSEPQPFVPALSVATLHPLHHPHHHHHHHQHHGGTGAPGGAGGGGGGSGGFNLPLNRGLERALEEAANSGGLNLSARKLKEFPRTAAPGHDLSDTVQADLSKNRLVEVPMELCHFVSLEILNLYHNCIRVIPEAIVNLQMLTYLNLSRNQLSALPACLCGLPLKVLIASNNKLGSLPEEIGQLKQLMELDVSCNEITALPQQIGQLKSLRELNVRRNYLKVLPQELVDLPLVKFDFSCNKVLVIPICFREMKQLQVLLLENNPLQSPPAQICTKGKVHIFKYLSIQACQIKTADSLYLHTMERPHLHQHVEDGKKDSDSGVGSDNGDKRLSATEPSDEDTVSLNVPMSNIMEEEQIIKEDSCHRLSPVKGEFHQEFQPEPSLLGDSTNSGEERDQFTDRADGLHSEFMNYKARAEDCEELLRIEEDVHWQTEGIISSSKDQDMDIAMIEQLREAVDLLQDPNGLSTDITERSVLNLYPMGSAEALELQDSALNGQIQLETSPVCEVQSDLTLQSNGSQYSPNEIRENSPAVSPTTNSTAPFGLKPRSVFLRPQRNLESIDPQFTIRRKMEQMREEKELVEQLRESIEMRLKVSLHEDLGAALMDGVVLCHLVNHIRPRSVASIHVPSPAVPKLSMAKCRRNVENFLEACRKLGVPEADLCSPCDILQLDFRHIRKTVDTLLALGEKAPPPTSALRSRDLIGFCLVHILFIVLVYITYHWNALSA

SEQ ID NO: 576 - protein, 654 aa, Homo sapien
MATPGSEPQPFVPALSVATLHPLHHPHHHHHHHQHHGGTGAPGGAGGGGGGSGGFNLPLNRGLERALEEAANSGGLNLSARKLKEFPRTAAPGHDLSDTVQADLSKNRLVEVPMELCHFVSLEILNLYHNCIRVIPEAIVNLQMLTYLNLRMSAATEITALPQQIGQLKSLRELNVRRNYLKVLPQELVDLPLVKFDFSCNKVLVIPICFREMKQLQVLLLENNPLQSPPAQICTKGKVHIFKYLSIQACQIKTADSLYLHTMERPHLHQHVEDGKKDSDSGVGSDNGDKRLSATEPSDEDTVSLNVPMSNIMEEEQIIKEDSCHRLSPVKGEFHQEFQPEPSLLGDSTNSGEERDQFTDRADGLHSEFMNYKARAEDCEELLRIEEDVHWQTEGIISSSKDQDMDIAMIEQLREAVDLLQDPNGLSTDITERSVLNLYPMGSAEALELQDSALNGQIQLETSPVCEVQSDLTLQSNGSQYSPNEIRENSPAVSPTTNSTAPFGLKPRSVFLRPQRNLESIDPQFTIRRKMEQMREEKELVEQLRESIEMRLKVSLHEDLGAALMDGVVLCHLVNHIRPRSVASIHVPSPAVPKLSMAKCRRNVENFLEACRKLGVPEEKLCLPHHILEEKGLVKVGITIQALLDITVTKALFT

SEQ ID NO: 577 - protein, 696 aa, Homo sapien
MATPGSEPQPFVPALSVATLHPLHHPHHHHHHHQHHGGTGAPGGAGGGGGGSGGFNLPLNRGLERALEEAANSGGLNLSARKLKEFPRTAAPGHDLSDTVQADLSKNRLVEVPMELCHFVSLEILNLYHNCIRVIPEAIVNLQMLTYLNLSRNQLSALPACLCGLPLKVLIASNNKLGSLPEEIGQLKQLMELDVSCNEITALPQQIGQLKSLRELNVRRNYLKVLPQELVDLPLVKFDFSCNKVLVIPICFREMKQLQVLLLENNPLQSPPAQICTKGKVHIFKYLSIQACQIKTADSLYLHTMERPHLHQHVEDGKKDSDSGVGSDNGDKRLSATEPSDEDTVSLNVPMSNIMEEEQIIKEDSCHRLSPVKGEFHQEFQPEPSLLGDSTNSGEERDQFTDRADGLHSEFMNYKARAEDCEELLRIEEDVHWQTEGIISSSKDQDMDIAMIEQLREAVDLLQDPNGLSTDITERSVLNLYPMGSAEALELQDSALNGQIQLETSPVCEVQSDLTLQSNGSQYSPNEIRENSPAVSPTTNSTAPFGLKPRSVFLRPQRNLESIDPQFTIRRKMEQMREEKELVEQLRESIEMRLKVSLHEDLGAALMDGVVLCHLVNHIRPRSVASIHVPSPAVPKLSMAKCRRNVENFLEACRKLGVPEEKLCLPHHILEEKGLVKVGITIQALLDITVTKALFT

SEQ ID NO: 578 - protein, 58 aa, Homo sapien
MAKCRRNVENFLEACRKLGVPEEKLCLPHHILEEKGLVKVGITIQALLDITVTKALFT

SEQ ID NO: 579 - protein, 65 aa, Homo sapien
LEDPVSSPFVCVIPLLCVIRSSAKIRSTEEKLCLPHHILEEKGLVKVGITIQALLDITVTKALFT

SEQ ID NO: 580 - protein, 536 aa, Homo sapien
MATPGSEPQPFVPALSVATLHPLHHPHHHHHHHQHHGGTGAPGGAGGGGGGSGGFNLPLNRGLERALEEAANSGGLNLSARKLKEFPRTAAPGHDLSDTVQADLSKNRLVEVPMELCHFVSLEILNLYHNCIRVIPEAIVNLQMLTYLNLSRNQLSALPACLCGLPLKVLIASNNKLGSLPEEIGQLKQLMELDVSCNEITALPQQIGQLKSLRELNVRRNYLKVLPQELVDLPLVKFDFSCNKVLVIPICFREMKQLQVLLLENNPLQSPPAQICTKGKVHIFKYLSIQACQIKTADSLYLHTMERPHLHQHVEDGKKDSDSGVGSDNGDKRLSATEPSDEDTVSLNVPMSNIMEEEQIIKEDSCHRLSPVKGEFHQEFQPEPSLLGDSTNSGEERDQFTDRADGLHSEFMNYKARAEDCEELLRIEEDVHWQTEGIISSSKDQDMDIAMIEQLREAVDLLQDPNGLSTDITERSVLNLYPMGSAEALELQDSALNGQIQLETSPVCEVQSDLTLQSNGSQYSPNEVSFLKINGR

SEQ ID NO: 581 - protein, 317 aa, Homo sapien
MATPGSEPQPFVPALSVATLHPLHHPHHHHHHHQHHGGTGAPGGAGGGGGGSGGFNLPLNRGLERALEEAANSGGLNLSARKLKEFPRTAAPGHDLSDTVQADLSKNRLVEVPMELCHFVSLEILNLYHNCIRVIPEAIVNLQMLTYLNLSRNQLSALPACLCGLPLKVLIASNNKLGSLPEEIGQLKQLMELDVSCNEITALPQQIGQLKSLRELNVRRNYLKVLPQELVDLPLVKFDFSCNKVLVIPICFREMKQLQVLLLENNPLQSPPAQICTKGKVHIFKYLSIQACQIKTADSLYLHTMERPHLHQHVEDG

SEQ ID NO: 582 - protein, 179 aa, Homo sapien
MNGGKYSPLEIRENSPAVSPTTNSTAPFGLKPRSVFLRPQRNLESIDPQFTIRRKMEQMREEKELVEQLRESIEMRLKVSLHEDLGAALMDGVVLCHLVNHIRPRSVASIHVPSPAVPKLSMAKCRRNVENFLEACRKLGVPEEKLCLPHHILEEKGLVKVGITIQALLDITVTKALFT

SEQ ID NO: 583 - protein, 77 aa, Homo sapien
MATPGSEPQPFVPALSVATLHPLHHPHHHHHHHQHHGGTGAPGGAGGGGGGSGGFNPLSHPLPVTSLTPVTLKQFSV

SEQ ID NO: 584 - protein, 502 aa, Homo sapien
MATPGSEPQPFVPALSVATLHPLHHPHHHHHHHQHHGGTGAPGGAGGGGGGSGGFNLPLNRGLERALEEAANSGGLNLSARKLKEFPRTAAPGHDLSDTVQADLSKNRLVEVPMELCHFVSLEILNLYHNCIRVIPEAIVNLQMLTYLNLSRNQLSALPACLCGLPLKVLIASNNKLGSLPEEIGQLKQLMELDVSCNEITALPQQIGQLKSLRELNVRRNYLKVLPQELVDLPLVKFDFSCNKVLVIPICFREMKQLQVLLLENNPLQSPPAQICTKGKVHIFKYLSIQACQIKTADSLYLHTMERPHLHQHVEDGKKDSDSGVGSDNGDKRLSATEPSDEDTVSLNVPMSNIMEEEQIIKEDSCHRLSPVKGEFHQEFQPEPSLLGDSTNSGEERDQFTDRADGLHSEFMNYKARAEDCEELLRIEEDVHWQTEGIISSSKDQDMDIAMIEQLREAVDLLQDPNGLSTDITERSVLNLYPMGSAEALELQDSALKYACLL

SEQ ID NO: 585 - protein, 151 aa, Homo sapien
MATPGSEPQPFVPALSVATLHPLHHPHHHHHHHQHHGGTGAPGGAGGGGGGSGGFNLPLNRGLERALEEAANSGGLNLSARKLKEFPRTAAPGHDLSDTVQADLSKNRLVEVPMELCHFVSLEILNLYHNCIRVIPEAIVNLQMLTYLNLR

SEQ ID NO: 586 - protein, 51 aa, Homo sapien [sequence omitted]

SEQ ID NO: 587 - protein, 86 aa, Homo sapien [sequence omitted]

SEQ ID NO: 588 - protein, 165 aa, Homo sapien
MLLAQQAGLLRSSASTLLVDVQFKLHSLCDSLKGLVWLSLTSLSSVPGDTLFPSSRLVLSLAPGLLVGKFNLLFISSGRATVLPSGPSSGIPFAVVGALIPLHVPCSVNPGDPRDRELTSVFFIWCSMPLGVCQTGPIMWVLHLFTHLPFAFRILFPVGNGFKSP

SEQ ID NO: 589 - protein, 104 aa, Homo sapien
MFSEALLIHRTYLAYLFACLLLMSSLTESLLQRTTPASRPRNVGKGKAWLVLVEMEMLVTVEECPPSDSQWGGALGPCHCPRTSAFGCPAERMRHLSSSFWSPE

SEQ ID NO: 590 - protein, 165 aa, Homo sapien; identical to SEQ ID NO: 588

SEQ ID NO: 591 - protein, 189 aa, Homo sapien [sequence omitted]

SEQ ID NO: 592 - protein, 86 aa, Homo sapien [sequence omitted]

SEQ ID NO: 593 - protein, 24 aa, Homo sapien
MYLTSFLVFSSESRDDDDNVTSHD

SEQ ID NO: 594 - protein, 30 aa, Homo sapien
MVIYQSPLQFLTWSSTSRKSSFLSQRVLGP

SEQ ID NO: 595 - protein, 94 aa, Homo sapien [sequence omitted]

SEQ ID NO: 596 - protein, 94 aa, Homo sapien [sequence omitted]

SEQ ID NO: 597 - protein, 82 aa, Homo sapien
ASSSPAPPGKHGEGRQEEVQVCPPPIHCPKTRWERKELFLEVELHVRNCNGLWWARWWPWAGSAPARLWTGASFGTSSWPGS

SEQ ID NO: 598 - protein, 144 aa, Homo sapien
AGETQRRPQCRPRAREWSRAPFPYRAATPARAARAASREPPARLPGSRGWGPGLVGAGGARGGGGLRPPRLLAHVDLAVACRAAPLRKLDGSGRDRALPASAGRLLLRCARLGWDSAGEGSCTLSHQAQCSRAAQRISFLVLRA

SEQ ID NO: 599 - protein, 151 aa, Homo sapien
MLGRGQNLPRDPEGQNTLEGPGILMSPLSPRWFSGMEKAPCPPLEPCSRADETPARPAEHYSRMKESQRKRQMCWPVNSLISNVNQIQAHDIRSASPTVGILCGPIVWTVWVRSLWLFCDACVGSSLSAQKLQTLWNRFSGPVAVTPALET

SEQ ID NO: 600 - protein, 127 aa, Homo sapien
MSPLSPRWFSGMEKAPCPPLEPCSRADETPARPAEHYSRMKESQRKRQMCWPVNSLISNVNQIQAHDIRSASPTVGILCGPIVWTVWVRSLWLFCDACVGSSLSAQKLQTLWNRFSGPVAVTPALET

SEQ ID NO: 601 - protein, 30 aa, Homo sapien
MCHIAKGKSLISRPNFNQIVNLTHYIFVNM

SEQ ID NO: 602 - protein, 191 aa, Homo sapien
MRESSSGFPSPAEVPVLATSLPIHRWGRPAAHPPCHCQVPWASSPHLLSPQSACCRWTVKIHWWTVHLSLVTLRCSLRIFVPLPQEVVVSQPSCQDLTLIVVYQETCRLPSYSRHVGMYLTVLLQNIDRHITDGPCLMEIRPQLVQLLSQPLEPLHCHSAPHLLLTVICQGRSHPRSTALSTSCLSVALPP

SEQ ID NO: 603 - protein, 134 aa, Homo sapien
MELRSREEELTRAALQQKSQEELLKRREQQLAEREIDVLERELNILIFQLNQEKPKVKKRKGKFKRSRLKLKDGHRISLPSDFQHKITVQASPNLDKRRSLNSSSSSPPSSPTMMPRLRAIQCELSALPRGLLC

SEQ ID NO: 604 - protein, 43 aa, Homo sapien
MHQGFFSLYLEYSLSSSSSGWLLPSFRSWVRCCFSGTLCYNHF

SEQ ID NO: 605 - protein, 55 aa, Homo sapien
MKKEQMILRRVPDIRKLTPKGTSKANWLQRPTTRKESSGVGLCTGDNGRICGCSS

SEQ ID NO: 606 - protein, 55 aa, Homo sapien
MLVSSCAFINLAKPECSTFRSEVPVLIAHPYSISESGIETFAIYYFPFHQHPPTC

SEQ ID NO: 607 - protein, 35 aa, Homo sapien
MLIDLLHCHSQKQWQYFVSIVMKLFALIGFYSGSA

SEQ ID NO: 608 - protein, 85 aa, Homo sapien
MEEASTCPSGSQSPCLSVLPDQFLCMALHPSPRAFLLPSDQRIDVELWAEQAELNSTELHQMRVQDNCLFSISPKAGSLSPLGSS

SEQ ID NO: 609 - protein, 65 aa, Homo sapien
MGRGALSSCCTRQAPSPSCSKLEPASCRPCQHPGWGRDQVVGEVEKGLSGWSAAAEKQQKRNGEG

SEQ ID NO: 610 - protein, 138 aa, Homo sapien
SLEGRVVRRRQPPSGRGSFLVTENYCPFTPGPNFPSPPPTIHPKTAVAGHYQGSGLSSRSLLRCSAATGRGLPVPGRPAGAGLHGEGGTQQLLYEAGPLPLLLKAGACFLSSLSAPWVGEGPGSGGSGKGIERLECSS

SEQ ID NO: 611 - protein, 23 aa, Homo sapien
MEKVSPIWRQSSVFPIGNRQNKR
